(19) United States
(12) Patent Application Publication
(10) Pub. No.: US 2006/0234246 A1
(43) Pub. Date: Oct. 19, 2006

(54) Gene products differentially expressed in cancerous cells

(75) Inventors: Elizabeth M. Scott, Emeryville, CA (US); George Lamson, Emeryville, CA (US); Altaf Kassam, Emeryville, CA (US); Guozhong Zhang, Emeryville, CA (US); Doreen Sakamoto, Emeryville, CA (US); Pablo Dominguez Garcia, Emeryville, CA (US); Theresa May, Emeryville, CA (US); Giulia C. Kennedy, Emeryville, CA (US); Sanmao Kang, Emeryville, CA (US); Christoph Reinhard, Emeryville, CA (US); Ann Bennett Jefferson, Emeryville, CA (US)

Correspondence Address: BOZICEVIC, FIELD & FRANCIS LLP, Suite 200, 1900 University Avenue, East Palo Alto, CA, 94303, US

(73) Assignee: Chiron Corporation

(21) Appl. No.: 10/934,842

(22) Filed: Sep. 2, 2004

Related U.S. Application Data
(63) Continuation-in-part of application No. 10/165,835, filed on Jun. 6, 2002, now abandoned.
Application No. 10/165,835 is a continuation of application No. 09/490,818, filed on Jan. 25, 2000, now Pat. No. 6,429,302.
(63) Continuation-in-part of application No. 09/883,152, filed on Jun. 15, 2001, now abandoned.
(63) Continuation-in-part of application No. PCT/US03/15465, filed on May 16, 2003.
(60) Provisional application No. 60/118,302, filed on Feb. 2, 1999.
(60) Provisional application No. 60/211,835, filed on Jun. 15, 2000.
(60) Provisional application No. 60/445,222, filed on Feb. 4, 2003.
(60) Provisional application No. 60/381,533, filed on May 17, 2002.

(51) Int. Cl. C12Q 1/68; G01N 33/574; C07H 21/04; C12P 21/06; C07K 14/82; C07K 16/30

(52) U.S. Cl. 435/6; 435/7.23; 435/69.1; 435/320.1; 435/325; 530/350; 530/388.8; 536/23.5

(57) ABSTRACT

The present invention provides polynucleotides, as well as polypeptides encoded thereby, that are differentially expressed in cancer cells. These polynucleotides are useful in a variety of diagnostic and therapeutic methods. The present invention further provides methods of reducing growth of cancer cells. These methods are useful for treating cancer.

### FIELD OF THE INVENTION

[0001] The present invention relates to polynucleotides of human origin in substantially isolated form and gene products that are differentially expressed in cancer cells, and uses thereof.

### BACKGROUND OF THE INVENTION

[0002] Cancer, like many diseases, is not the result of a single, well-defined cause, but rather can be viewed as several diseases, each caused by different aberrations in informational pathways, that ultimately result in apparently similar pathologic phenotypes. Identification of polynucleotides that correspond to genes that are differentially expressed in cancerous, pre-cancerous, or low metastatic potential cells relative to normal cells of the same tissue type, provides the basis for diagnostic tools, facilitates drug discovery by providing for targets for candidate agents, and further serves to identify therapeutic targets for cancer therapies that are more tailored for the type of cancer to be treated.

[0003] Identification of differentially expressed gene products also furthers the understanding of the progression and nature of complex diseases such as cancer, and is key to identifying the genetic factors that are responsible for the phenotypes associated with development of, for example, the metastatic phenotype. Identification of gene products that are differentially expressed at various stages, and in various types of cancers, can both provide for early diagnostic tests, and further serve as therapeutic targets. Additionally, the product of a differentially expressed gene can be the basis for screening assays to identify chemotherapeutic agents that modulate its activity (e.g. its expression, biological activity, and the like).

[0004] Early disease diagnosis is of central importance to halting disease progression, and reducing morbidity. Analysis of a patient's tumor to identify the gene products that are differentially expressed, and administration of therapeutic agent(s) designed to modulate the activity of those differentially expressed gene products, provides the basis for more specific, rational cancer therapy that may result in diminished adverse side effects relative to conventional therapies. Furthermore, confirmation that a tumor poses less risk to the patient (e.g., that the tumor is benign) can avoid unnecessary therapies. In short, identification of genes and the encoded gene products that are differentially expressed in cancerous cells can provide the basis of therapeutics, diagnostics, prognostics, therametrics, and the like.

[0005] For example, breast cancer is a leading cause of death among women. One of the priorities in breast cancer research is the discovery of new biochemical markers that can be used for diagnosis, prognosis and monitoring of breast cancer. The prognostic usefulness of these markers depends on the ability of the marker to distinguish between patients with breast cancer who require aggressive therapeutic treatment and patients who should be monitored.

[0006] While the pathogenesis of breast cancer is unclear, transformation of non-tumorigenic breast epithelium to a malignant phenotype may be the result of genetic factors, especially in women under 30 (Miki, et al., Science, 266: 66-71, 1994). However, it is likely that other, non-genetic factors are also significant in the etiology of the disease. Regardless of its origin, breast cancer morbidity increases significantly if a lesion is not detected early in its progression. Thus, considerable effort has focused on the elucidation of early cellular events surrounding transformation in breast tissue. Such effort has led to the identification of several potential breast cancer markers.

[0007] Thus, the identification of new markers associated with cancer, for example, breast cancer, and the identification of genes involved in transforming cells into the cancerous phenotype, remains a significant goal in the management of this disease. In exemplary aspects, the invention described herein provides cancer diagnostics, prognostics, therametrics, and therapeutics based upon polynucleotides and/or their encoded gene products.

### SUMMARY OF THE INVENTION

[0008] The present invention provides methods and compositions useful in detection of cancerous cells, identification of agents that modulate the phenotype of cancerous cells, and identification of therapeutic targets for chemotherapy of cancerous cells. Cancerous, breast, colon and prostate cells are of particular interest in each of these aspects of the invention. More specifically, the invention provides polynucleotides in substantially isolated form, as well as polypeptides encoded thereby, that are differentially expressed in cancer cells. Also provided are antibodies that specifically bind the encoded polypeptides. These polynucleotides, polypeptides and antibodies are thus useful in a variety of diagnostic, therapeutic, and drug discovery methods. In some embodiments, a polynucleotide that is differentially expressed in cancer cells can be used in diagnostic assays to detect cancer cells. In other embodiments, a polynucleotide that is differentially expressed in cancer cells, and/or a polypeptide encoded thereby, is itself a target for therapeutic intervention.

[0009] Accordingly, the invention features an isolated polynucleotide comprising a nucleotide sequence having at least 90% sequence identity to an identifying sequence of any one of the sequences set forth herein or a degenerate variant thereof. In related aspects, the invention features recombinant host cells and vectors comprising the polynucleotides of the invention, as well as isolated polypeptides encoded by the polynucleotides of the invention and antibodies that specifically bind such polypeptides.

[0010] In other aspects, the invention provides a method for detecting a cancerous cell. In general, the method involves contacting a test sample obtained from a cell that is suspected of being a cancer cell with a probe for detecting a gene product differentially expressed in cancer. Many embodiments of the invention involve a gene identifiable by or comprising a sequence selected from the group consisting of SEQ ID NOS: 1, 3, 5, 7, 9, 11-13, 15, 16, 18, 20, 22, 24, 26, 27, 29 and 128-1618, contacting the probe and the gene product for a time sufficient for binding of the probe to the gene product; and comparing a level of binding of the probe to the sample with a level of probe binding to a control sample obtained from a control cell of known cancerous state. A modulated (i.e. increased or decreased) level of binding of the probe in the test cell sample relative to the level of binding in a control sample is indicative of the cancerous state of the test cell. In certain embodiments, the level of binding of the probe in the test cell sample, usually in relation to at least one control gene, is similar to binding of the probe to a cancerous cell sample. In certain other embodiments, the level of binding of the probe in the test cell sample, usually in relation to at least one control gene, is different, i.e. opposite, to binding of the probe to a non-cancerous cell sample. In specific embodiments, the probe is a polynucleotide probe and the gene product is nucleic acid. In other specific embodiments, the gene product is a polypeptide. In further embodiments, the gene product or the probe is immobilized on an array.

[0011] In another aspect, the invention provides a method for assessing the cancerous phenotype (e.g., metastasis, metastatic potential, aberrant cellular proliferation, and the like) of a cell comprising detecting expression of a gene product in a test cell sample, wherein the gene comprises or is identifiable using a sequence selected from the group consisting of SEQ ID NOS: 1, 3, 5, 7, 9, 11-13, 15, 16, 18, 20, 22, 24, 26, 27, 29 and 128-1618; and comparing a level of expression of the gene product in the test cell sample with a level of expression of the gene in a control cell sample. Comparison of the level of expression of the gene in the test cell sample relative to the level of expression in the control cell sample is indicative of the cancerous phenotype of the test cell sample. In specific embodiments, detection of gene expression is by detecting a level of an RNA transcript in the test cell sample. In other specific embodiments detection of expression of the gene is by detecting a level of a polypeptide in a test sample.

[0012] In another aspect, the invention provides a method for suppressing or inhibiting a cancerous phenotype of a cancerous cell, the method comprising introducing into a mammalian cell an expression modulatory agent (e.g. an antisense molecule, small molecule, antibody, neutralizing antibody, inhibitory RNA molecule, etc.) to inhibit expression of a gene identified by a sequence selected from the group consisting of SEQ ID NOS: 1, 3, 5, 7, 9, 11-13, 15, 16, 18, 20, 22, 24, 26, 27, 29 and 128-1618. Inhibition of expression of the gene inhibits development of a cancerous phenotype in the cell. In specific embodiments, the cancerous phenotype is metastasis, aberrant cellular proliferation relative to a normal cell, or loss of contact inhibition of cell growth. In the context of this invention “expression” of a gene is intended to encompass the expression of an activity of a gene product, and, as such, inhibiting expression of a gene includes inhibiting the activity of a product of the gene.

[0013] In another aspect, the invention provides a method for assessing the tumor burden of a subject, the method comprising detecting a level of a differentially expressed gene product in a test sample from a subject suspected of or having a tumor, the differentially expressed gene product identified by or comprising a sequence selected from the group consisting of SEQ ID NOS: 1, 3, 5, 7, 9, 11-13, 15, 16, 18, 20, 22, 24, 26, 27, 29 and 128-1618. Detection of the level of the gene product in the test sample is indicative of the tumor burden in the subject.

[0014] In another aspect, the invention provides a method for identifying agents that modulate (i.e. increase or decrease) the biological activity of a gene product differentially expressed in a cancerous cell, the method comprising contacting a candidate agent with a differentially expressed gene product, the differentially expressed gene product corresponding to a sequence selected from the group consisting of SEQ ID NOS: 1, 3, 5, 7, 9, 11-13, 15, 16, 18, 20, 22, 24, 26, 27, 29 and 128-1618; and detecting a modulation in a biological activity of the gene product relative to a level of biological activity of the gene product in the absence of the candidate agent. In specific embodiments, the detecting is by identifying an increase or decrease in expression of the differentially expressed gene product. In other specific embodiments, the gene product is mRNA or cDNA prepared from the mRNA gene product. In further embodiments, the gene product is a polypeptide.

[0015] In another aspect, the invention provides a method of inhibiting growth of a tumor cell by modulating expression of a gene product, where the gene product is encoded by a gene identified by a sequence selected from the group consisting of: SEQ ID NOS: 1, 3, 5, 7, 9, 11-13, 15, 16, 18, 20, 22, 24, 26, 27, 29 and 128-1618.

[0016] These and other objects, advantages, and features of the invention will become apparent to those persons skilled in the art upon reading the details of the invention as more fully described below.

### BRIEF DESCRIPTION OF THE FIGURES

[0017] FIG. 1 is a graph showing the message levels of the gene corresponding to SK2 (c9083, SEQ ID NO:3) in the indicated cell lines.

[0018] FIG. 2 is a graph showing the effect of SK2 (9083) antisense oligonucleotides upon message levels for the gene corresponding to SK2 (SEQ ID NO:3).

[0019] FIG. 3 is a graph showing the effect of SK2 (9083) antisense oligonucleotides upon proliferation of SW620 cells.

[0020] FIG. 4 is a graph showing the effect of SK2 (9083) antisense oligonucleotides upon proliferation of a non-colon cell line, HT1080.

[0021] FIG. 5 is a graph showing the effect of antisense oligonucleotides to the gene corresponding to cluster 378805 upon growth of SW620 cells (31-4 as: antisense; 31-4rc: reverse control; WT: wild type control (no oligo)).

[0022] FIG. 6 is a graph showing the results of proliferation assay with SW620 assays to examine the effects of expression of K-Ras (control).

[0023] FIG. 7 is a graph showing the results of proliferation assay with SW620 assays to examine the effects of expression of, the gene corresponding to c3376 (CHIR11-4).

[0024] FIG. 8 is a graph showing the results of proliferation assay with SW620 assays to examine the effects of expression of the gene corresponding to 402380 (CHIR33-4).

[0025] FIG. 9 is a graph showing the effects of expression of genes corresponding to K-Ras (control) and to 402380 (CHIR33-4) upon colon formation of SW620 cells in soft agar (values normalized to WST1).

### DETAILED DESCRIPTION OF THE INVENTION

[0026] The present invention provides polynucleotides, as well as polypeptides encoded thereby, that are differentially expressed in cancer cells. Methods are provided in which these polynucleotides and polypeptides are used for detecting and reducing the growth of cancer cells. Also provided are methods in which the polynucleotides and polypeptides of the invention are used in a variety of diagnostic and therapeutic applications for cancer. The invention finds use in the prevention, treatment, detection or research into any cancer, including prostrate, pancreas, colon, brain, lung, breast, bone, skin cancers. For example, the invention finds use in the prevention, treatment, detection of or research into endocrine system cancers, such as cancers of the thyroid, pituitary, and adrenal glands and the pancreatic islets; gastrointestinal cancers, such as cancer of the anus, colon, esophagus, gallbladder, stomach, liver, and rectum; genitourinary cancers such as cancer of the penis, prostate and testes; gynecological cancers, such as cancer of the ovaries, cervix, endometrium, uterus, fallopian tubes, vagina, and vulva; head and neck cancers, such as hypopharyngeal, laryngeal, oropharyngeal cancers, lip, mouth and oral cancers, cancer of the salivary gland, cancer of the digestive tract and sinus cancer; leukemia; lymphomas including Hodgkin's and non-Hodgkin's lymphoma; metastatic cancer; myelomas; sarcomas; skin cancer; urinary tract cancers including bladder, kidney and urethral cancers; and pediatric cancers, such as pediatric brain tumors, leukemia, lymphomas, sarcomas, liver cancer and neuroblastoma and retinoblastoma.

[0027] Before the present invention is described, it is to be understood that this invention is not limited to particular embodiments described, as such may, of course, vary. It is also to be understood that the terminology used herein is for the purpose of describing particular embodiments only, and is not intended to be limiting.

[0028] Unless defined otherwise, all technical and scientific terms used herein have the same meaning as commonly understood by one of ordinary skill in the art to which this invention belongs. Although any methods and materials similar or equivalent to those described herein can be used in the practice or testing of the present invention, the preferred methods and materials are now described. All publications and patent applications mentioned herein are incorporated herein by reference to disclose and describe the methods and/or materials in connection with which the publications are cited.

[0029] It must be noted that as used herein and in the appended claims, the singular forms “a”, “and”, and “the” include plural referents unless the context clearly dictates otherwise. Thus, for example, reference to “a polynucleotide” includes a plurality of such polynucleotides and reference to “the cancer cell” includes reference to one or more cells and equivalents thereof known to those skilled in the art, and so forth.

[0030] The publications and applications discussed herein are provided solely for their disclosure prior to the filing date of the present application. Nothing herein is to be construed as an admission that the present invention is not entitled to antedate such publication by virtue of prior invention. Further, the dates of publication provided may be different from the actual publication dates which may need to be independently confirmed.

[0031] Definitions

[0032] The terms “polynucleotide” and “nucleic acid”, used interchangeably herein, refer to polymeric forms of nucleotides of any length, either ribonucleotides or deoxynucleotides. Thus, these terms include, but are not limited to, single-, double-, or multi-stranded DNA or RNA, genomic DNA, cDNA, DNA-RNA hybrids, or a polymer comprising purine and pyrimidine bases or other natural, chemically or biochemically modified, non-natural, or derivatized nucleotide bases. These terms further include, but are not limited to, mRNA or cDNA that comprise intronic sequences (see, e.g., Niwa et al. (1999) Cell 99(7):691-702). The backbone of the polynucleotide can comprise sugars and phosphate groups (as may typically be found in RNA or DNA), or modified or substituted sugar or phosphate groups. Alternatively, the backbone of the polynucleotide can comprise a polymer of synthetic subunits such as phosphoramidites and thus can be an oligodeoxynucleoside phosphoramidate or a mixed phosphoramidate-phosphodiester oligomer. Peyrottes et al. (1996) Nucl. Acids Res. 24:1841-1848; Chaturvedi et al. (1996) Nucl. Acids Res. 24:2318-2323. A polynucleotide may comprise modified nucleotides, such as methylated nucleotides and nucleotide analogs, uracyl, other sugars, and linking groups such as fluororibose and thioate, and nucleotide branches. The sequence of nucleotides may be interrupted by non-nucleotide components. A polynucleotide may be further modified after polymerization, such as by conjugation with a labeling component. Other types of modifications included in this definition are caps, substitution of one or more of the naturally occurring nucleotides with an analog, and introduction of means for attaching the polynucleotide to proteins, metal ions, labeling components, other polynucleotides, or a solid support. The term “polynucleotide” also encompasses peptidic nucleic acids (Pooga et al Curr Cancer Drug Targets. (2001) 1:231-9).

[0033] A “gene product” is a biopolymeric product that is expressed or produced by a gene. A gene product may be, for example, an unspliced RNA, an mRNA, a splice variant mRNA, a polypeptide, a post-translationally modified polypeptide, a splice variant polypeptide etc. Also encompassed by this term is biopolymeric products that are made using an RNA gene product as a template (i.e. cDNA of the RNA). A gene product may be made enzymatically, recombinantly, chemically, or within a cell to which the gene is native. In many embodiments, if the gene product is proteinaceous, it exhibits a biological activity. In many embodiments, if the gene product is a nucleic acid, it can be translated into a proteinaceous gene product that exhibits a biological activity.

[0034] A composition (e.g. a polynucleotide, polypeptide, antibody, or host cell) that is “isolated” or “in substantially isolated form” refers to a composition that is in an environment different from that in which the composition naturally occurs. For example, a polynucleotide that is in substantially isolated form is outside of the host cell in which the polynucleotide naturally occurs, and could be a purified fragment of DNA, could be part of a heterologous vector, or could be contained within a host cell that is not a host cell from which the polynucleotide naturally occurs. The term “isolated” does not refer to a genomic or cDNA library, whole cell total protein or mRNA preparation, genomic DNA preparation, or an isolated human chromosome. A composition which is in substantially isolated form is usually substantially purified.

[0035] As used herein, the term “substantially purified” refers to a compound (e.g., a polynucleotide, a polypeptide or an antibody, etc.) that is removed from its natural environment and is usually at least 60% free, preferably 75% free, and most preferably 90% free from other components with which it is naturally associated. Thus, for example, a composition containing A is “substantially free of” B when at least 85% by weight of the total A+B in the composition is A. Preferably, A comprises at least about 90% by weight of the total of A+B in the composition, more preferably at least about 95% or even 99% by weight. In the case of polynucleotides, “A” and “B” may be two different genes positioned on different chromosomes or adjacently on the same chromosome, or two isolated cDNA species, for example.

[0036] The terms “polypeptide” and “protein”, interchangeably used herein, refer to a polymeric form of amino acids of any length, which can include coded and non-coded amino acids, chemically or biochemically modified or derivatized amino acids, and polypeptides having modified peptide backbones. The term includes fusion proteins, including, but not limited to, fusion proteins with a heterologous amino acid sequence, fusions with heterologous and homologous leader sequences, with or without N-terminal methionine residues; immunologically tagged proteins; and the like.

[0037] “Heterologous” refers to materials that are derived from different sources (e.g., from different genes, different species, etc.).

[0038] As used herein, the terms “a gene that is differentially expressed in a cancer cell,” and “a polynucleotide that is differentially expressed in a cancer cell” are used interchangeably herein, and generally refer to a polynucleotide that represents or corresponds to a gene that is differentially expressed in a cancerous cell when compared with a cell of the same cell type that is not cancerous, e.g., mRNA is found at levels at least about 25%, at least about 50% to about 75%, at least about 90%, at least about 1.5-fold, at least about 2-fold, at least about 5-fold, at least about 10-fold, or at least about 50-fold or more, different (e.g., higher or lower). The comparison can be made in tissue, for example, if one is using in situ hybridization or another assay method that allows some degree of discrimination among cell types in the tissue. The comparison may also or alternatively be made between cells removed from their tissue source.

[0039] “Differentially expressed polynucleotide” as used herein refers to a nucleic acid molecule (RNA or DNA) comprising a sequence that represents a differentially expressed gene, e.g., the differentially expressed polynucleotide comprises a sequence (e.g., an open reading frame encoding a gene product; a non-coding sequence) that uniquely identifies a differentially expressed gene so that detection of the differentially expressed polynucleotide in a sample is correlated with the presence of a differentially expressed gene in a sample. “Differentially expressed polynucleotides” is also meant to encompass fragments of the disclosed polynucleotides, e.g., fragments retaining biological activity, as well as nucleic acids homologous, substantially similar, or substantially identical (e.g., having about 90% sequence identity) to the disclosed polynucleotides.

[0040] “Corresponds to” or “represents” when used in the context of, for example, a polynucleotide or sequence that “corresponds to” or “represents” a gene means that at least a portion of a sequence of the polynucleotide is present in the gene or in the nucleic acid gene product (e.g., mRNA or cDNA). A subject nucleic acid may also be “identified” by a polynucleotide if the polynucleotide corresponds to or represents the gene. Genes identified by a polynucleotide may have all or a portion of the identifying sequence wholly present within an exon of a genomic sequence of the gene, or different portions of the sequence of the polynucleotide may be present in different exons (e.g., such that the contiguous polynucleotide sequence is present in an mRNA, either pre- or post-splicing, that is an expression product of the gene). In some embodiments, the polynucleotide may represent or correspond to a gene that is modified in a cancerous cell relative to a normal cell. The gene in the cancerous cell may contain a deletion, insertion, substitution, or translocation relative to the polynucleotide and may have altered regulatory sequences, or may encode a splice variant gene product, for example. The gene in the cancerous cell may be modified by insertion of an endogenous retrovirus, a transposable element, or other naturally occurring or non-naturally occurring nucleic acid. In most cases, a polynucleotide corresponds to or represents a gene if the sequence of the polynucleotide is most identical to the sequence of a gene or its product (e.g. mRNA or cDNA) as compared to other genes or their products. In most embodiments, the most identical gene is determined using a sequence comparison of a polynucleotide to a database of polynucleotides (e.g. GenBank) using the BLAST program at default settings For example, if the most similar gene in the human genome to an exemplary polynucleotide is the protein kinase C gene, the exemplary polynucleotide corresponds to protein kinase C. In most cases, the sequence of a fragment of an exemplary polynucleotide is at least 95%, 96%, 97%, 98%, 99% or up to 100% identical to a sequence of at least 15, 20, 25, 30, 35, 40, 45, or 50 contiguous nucleotides of a corresponding gene or its product (mRNA or cDNA), when nucleotides that are “N” represent G, A, T or C.

[0041] An “identifying sequence” is a minimal fragment of a sequence of contiguous nucleotides that uniquely identifies or defines a polynucleotide sequence or its complement. In many embodiments, a fragment of a polynucleotide uniquely identifies or defines a polynucleotide sequence or its complement. In some embodiments, the entire contiguous sequence of a gene, cDNA, EST, or other provided sequence is an identifying sequence.

[0042] “Diagnosis” as used herein generally includes determination of a subject's susceptibility to a disease or disorder, determination as to whether a subject is presently affected by a disease or disorder, prognosis of a subject affected by a disease or disorder (e.g., identification of pre-metastatic or metastatic cancerous states, stages of cancer, or responsiveness of cancer to therapy), and use of therametrics (e.g., monitoring a subject's condition to provide information as to the effect or efficacy of therapy).

[0043] As used herein, the term “a polypeptide associated with cancer” refers to a polypeptide encoded by a polynucleotide that is differentially expressed in a cancer cell.

[0044] The term “biological sample” encompasses a variety of sample types obtained from an organism and can be used in a diagnostic or monitoring assay. The term encompasses blood and other liquid samples of biological origin, solid tissue samples, such as a biopsy specimen or tissue cultures or cells derived therefrom and the progeny thereof. The term encompasses samples that have been manipulated in any way after their procurement, such as by treatment with reagents, solubilization, or enrichment for certain components. The term encompasses a clinical sample, and also includes cells in cell culture, cell supernatants, cell lysates, serum, plasma, biological fluids, and tissue samples.

[0045] The terms “treatment”, “treating”, “treat” and the like are used herein to generally refer to obtaining a desired pharmacologic and/or physiologic effect. The effect may be prophylactic in terms of completely or partially preventing a disease or symptom thereof and/or may be therapeutic in terms of a partial or complete stabilization or cure for a disease and/or adverse effect attributable to the disease. “Treatment” as used herein covers any treatment of a disease in a mammal, particularly a human, and includes: (a) preventing the disease or symptom from occurring in a subject which may be predisposed to the disease or symptom but has not yet been diagnosed as having it; (b) inhibiting the disease symptom, i.e., arresting its development; or (c) relieving the disease symptom, i.e., causing regression of the disease or symptom.

[0046] The terms “individual,” “subject,” “host,” and “patient,” used interchangeably herein and refer to any mammalian subject for whom diagnosis, treatment, or therapy is desired, particularly humans. Other subjects may include cattle, dogs, cats, guinea pigs, rabbits, rats, mice, horses, and the like.

[0047] A “host cell”, as used herein, refers to a microorganism or a eukaryotic cell or cell line cultured as a unicellular entity which can be, or has been, used as a recipient for a recombinant vector or other transfer polynucleotides, and include the progeny of the original cell which has been transfected. It is understood that the progeny of a single cell may not necessarily be completely identical in morphology or in genomic or total DNA complement as the original parent, due to natural, accidental, or deliberate mutation.

[0048] The terms “cancer”, “neoplasm”, “tumor”, and “carcinoma”, are used interchangeably herein to refer to cells which exhibit relatively autonomous growth, so that they exhibit an aberrant growth phenotype characterized by a significant loss of control of cell proliferation. In general, cells of interest for detection or treatment in the present application include precancerous (e.g., benign), malignant, pre-metastatic, metastatic, and non-metastatic cells. Detection of cancerous cells is of particular interest.

[0049] The term “normal” as used in the context of “normal cell,” is meant to refer to a cell of an untransformed phenotype or exhibiting a morphology of a non-transformed cell of the tissue type being examined.

[0050] “Cancerous phenotype” generally refers to any of a variety of biological phenomena that are characteristic of a cancerous cell, which phenomena can vary with the type of cancer. The cancerous phenotype is generally identified by abnormalities in, for example, cell growth or proliferation (e.g., uncontrolled growth or proliferation), regulation of the cell cycle, cell mobility, cell-cell interaction, or metastasis, etc.

[0051] “Therapeutic target” generally refers to a gene or gene product that, upon modulation of its activity (e.g., by modulation of expression, biological activity, and the like), can provide for modulation of the cancerous phenotype.

[0052] As used throughout, “modulation” is meant to refer to an increase or a decrease in the indicated phenomenon (e.g., modulation of a biological activity refers to an increase in a biological activity or a decrease in a biological activity).

[0053] Polynucleotide Compositions

[0054] The present invention provides isolated polynucleotides that contain nucleic acids that are differentially expressed in cancer cells. The polynucleotides, as well as any polypeptides encoded thereby, find use in a variety of therapeutic and diagnostic methods.

[0055] The scope of the invention with respect to compositions containing the isolated polynucleotides useful in the methods described herein includes, but is not necessarily limited to, polynucleotides having (i.e., comprising) a sequence set forth in any one of the polynucleotide sequences provided herein, or fragment thereof; polynucleotides obtained from the biological materials described herein or other biological sources (particularly human sources) by hybridization under stringent conditions (particularly conditions of high stringency); genes corresponding to the provided polynucleotides; cDNAs corresponding to the provided polynucleotides; variants of the provided polynucleotides and their corresponding genes, particularly those variants that retain a biological activity of the encoded gene product (e.g., a biological activity ascribed to a gene product corresponding to the provided polynucleotides as a result of the assignment of the gene product to a protein family(ies) and/or identification of a functional domain present in the gene product). Other nucleic acid compositions contemplated by and within the scope of the present invention will be readily apparent to one of ordinary skill in the art when provided with the disclosure here. “Polynucleotide” and “nucleic acid” as used herein with reference to nucleic acids of the composition is not intended to be limiting as to the length or structure of the nucleic acid unless specifically indicated.

[0056] The invention features polynucleotides that represent genes that are expressed in human tissue, specifically polynucleotides that are differentially expressed in tissues containing cancerous cells. Nucleic acid compositions described herein of particular interest are at least about 15 bp in length, at least about 30 bp in length, at least about 50 bp in length, at least about 100 bp, at least about 200 bp in length, at least about 300 bp in length, at least about 500 bp in length, at least about 800 bp in length, at least about 1 kb in length, at least about 2.0 kb in length, at least about 3.0 kb in length, at least about 5 kb in length, at least about 10 kb in length, at least about 50 kb in length and are usually less than about 200 kb in length. These polynucleotides (or polynucleotide fragments) have uses that include, but are not limited to, diagnostic probes and primers as starting materials for probes and primers, as discussed herein.

[0057] The subject polynucleotides usually comprise a sequence set forth in any one of the polynucleotide sequences provided herein, for example, in the sequence listing, incorporated by reference in a table (e.g. by an NCBI accession number), a cDNA deposited at the A.T.C.C., or a fragment or variant thereof. A “fragment” or “portion” of a polynucleotide is a contiguous sequence of residues at least about 10 nt to about 12 nt, 15 nt, 16 nt, 18 nt or 20 nt in length, usually at least about 22 nt, 24 nt, 25 nt, 30 nt, 40 nt, 50 nt, 60 nt, 70 nt, 80 nt, 90 nt, 100 nt to at least about 150 nt, 200 nt, 250 nt, 300 nt, 350 nt, 400 nt, 500 nt, 800 nt or up to about 1000 nt, 1500 or 2000 nt in length. In some embodiments, a fragment of a polynucleotide is the coding sequence of a polynucleotide. A fragment of a polynucleotide may start at position 1 (i.e. the first nucleotide) of a nucleotide sequence provided herein, or may start at about position 10, 20, 30, 50, 75, 100, 150, 200, 250, 300, 350, 400, 450, 500, 600, 700, 800, 900, 1000, 1500 or 2000, or an ATG translational initiation codon of a nucleotide sequence provided herein. In this context “about” includes the particularly recited value or a value larger or smaller by several (5, 4, 3, 2, or 1) nucleotides. The described polynucleotides and fragments thereof find use as hybridization probes, PCR primers, BLAST probes, or as an identifying sequence, for example.

[0058] The subject nucleic acids may be variants or degenerate variants of a sequence provided herein. In general, a variants of a polynucleotide provided herein have a fragment of sequence identity that is greater than at least about 65%, greater than at least about 70%, greater than at least about 75%, greater than at least about 80%, greater than at least about 85%, or greater than at least about 90%, 95%, 96%, 97%, 98%, 99% or more (i.e. 100%) as compared to an identically sized fragment of a provided sequence. as determined by the Smith-Waterman homology search algorithm as implemented in MPSRCH program (Oxford Molecular). For the purposes of this invention, a preferred method of calculating percent identity is the Smith-Waterman algorithm. Global DNA sequence identity should be greater than 65% as determined by the Smith-Waterman homology search algorithm as implemented in MPSRCH program (Oxford Molecular) using an gap search with the following search parameters: gap open penalty, 12; and gap extension penalty, 1.

[0059] The subject nucleic acid compositions include full-length cDNAs or mRNAs that encompass an identifying sequence of contiguous nucleotides from any one of the polynucleotide sequences provided herein.

[0060] As discussed above, the polynucleotides useful in the methods described herein also include polynucleotide variants having sequence similarity or sequence identity. Nucleic acids having sequence similarity are detected by hybridization under low stringency conditions, for example, at 50° C. and 10×SSC (0.9 M saline/0.09 M sodium citrate) and remain bound when subjected to washing at 55° C. in 1×SSC. Sequence identity can be determined by hybridization under high stringency conditions, for example, at 50° C. or higher and 0.1×SSC (9 mM saline/0.9 mM sodium citrate). Hybridization methods and conditions are well known in the art, see, e.g., U.S. Pat. No. 5,707,829. Nucleic acids that are substantially identical to the provided polynucleotide sequences, e.g. allelic variants, genetically altered versions of the gene, etc., bind to the provided polynucleotide sequences under stringent hybridization conditions. By using probes, particularly labeled probes of DNA sequences, one can isolate homologous or related genes. The source of homologous genes can be any species, e.g. primate species, particularly human; rodents, such as rats and mice; canines, felines, bovines, ovines, equines, yeast, nematodes, etc.

[0061] In one embodiment, hybridization is performed using a fragment of at least 15 contiguous nucleotides (nt) of at least one of the polynucleotide sequences provided herein. That is, when at least 15 contiguous nt of one of the disclosed polynucleotide sequences is used as a probe, the probe will preferentially hybridize with a nucleic acid comprising the complementary sequence, allowing the identification and retrieval of the nucleic acids that uniquely hybridize to the selected probe. Probes from more than one polynucleotide sequence provided herein can hybridize with the same nucleic acid if the cDNA from which they were derived corresponds to one mRNA.

[0062] Polynucleotides contemplated for use in the invention also include those having a sequence of naturally occurring variants of the nucleotide sequences (e.g., degenerate variants (e.g., sequences that encode the same polypeptides but, due to the degenerate nature of the genetic code, different in nucleotide sequence), allelic variants, etc.). Variants of the polynucleotides contemplated by the invention are identified by hybridization of putative variants with nucleotide sequences disclosed herein, preferably by hybridization under stringent conditions. For example, by using appropriate wash conditions, variants of the polynucleotides described herein can be identified where the allelic variant exhibits at most about 25-30% base pair (bp) mismatches relative to the selected polynucleotide probe. In general, allelic variants contain 15-25% bp mismatches, and can contain as little as even 5-15%, or 2-5%, or 1-2% bp mismatches, as well as a single bp mismatch.

[0063] The invention also encompasses homologs corresponding to any one of the polynucleotide sequences provided herein, where the source of homologous genes can be any mammalian species, e.g., primate species, particularly human; rodents, such as rats; canines, felines, bovines, ovines, equines, yeast, nematodes, etc. Between mammalian species, e.g., human and mouse, homologs generally have substantial sequence similarity, e.g., at least 75% sequence identity, usually at least 80%%, at least 85, at least 90%, at least 95%, at least 96%, at least 97%, at least 98%, at least 99% or even 100% identity between nucleotide sequences. Sequence similarity is calculated based on a reference sequence, which may be a subset of a larger sequence, such as a conserved motif, coding region, flanking region, etc. A reference sequence will usually be at least about a fragment of a polynucleotide sequence and may extend to the complete sequence that is being compared. Algorithms for sequence analysis are known in the art, such as gapped BLAST, described in Altschul, et al. Nucleic Acids Res. (1997) 25:3389-3402, or TeraBLAST available from TimeLogic Corp. (Crystal Bay, Nev.).

[0064] The subject nucleic acids can be cDNAs or genomic DNAs, as well as fragments thereof, particularly fragments that encode a biologically active gene product and/or are useful in the methods disclosed herein (e.g., in diagnosis, as a unique identifier of a differentially expressed gene of interest, etc.). The term “cDNA” as used herein is intended to include all nucleic acids that share the arrangement of sequence elements found in native mature mRNA species, where sequence elements are exons and 3′ and 5′ non-coding regions. Normally mRNA species have contiguous exons, with the intervening introns, when present, being removed by nuclear RNA splicing, to create a continuous open reading frame encoding a polypeptide. mRNA species can also exist with both exons and introns, where the introns may be removed by alternative splicing. Furthermore it should be noted that different species of mRNAs encoded by the same genomic sequence can exist at varying levels in a cell, and detection of these various levels of mRNA species can be indicative of differential expression of the encoded gene product in the cell.

[0065] A genomic sequence of interest comprises the nucleic acid present between the initiation codon and the stop codon, as defined in the listed sequences, including all of the introns that are normally present in a native chromosome. It can further include the 3′ and 5′ untranslated regions found in the mature mRNA. It can further include specific transcriptional and translational regulatory sequences, such as promoters, enhancers, etc., including about 1 kb, but possibly more, of flanking genomic DNA at either the 5′ and 3′ end of the transcribed region. The genomic DNA can be isolated as a fragment of 100 kbp or smaller; and substantially free of flanking chromosomal sequence. The genomic DNA flanking the coding region, either 3′ and 5′, or internal regulatory sequences as sometimes found in introns, contains sequences required for proper tissue, stage-specific, or disease-state specific expression.

[0066] The nucleic acid compositions of the subject invention can encode all or a part of the naturally-occurring polypeptides. Double or single stranded fragments can be obtained from the DNA sequence by chemically synthesizing oligonucleotides in accordance with conventional methods, by restriction enzyme digestion, by PCR amplification, etc.

[0067] Probes specific to the polynucleotides described herein can be generated using the polynucleotide sequences disclosed herein. The probes are usually a fragment of a polynucleotide sequences provided herein. The probes can be synthesized chemically or can be generated from longer polynucleotides using restriction enzymes. The probes can be labeled, for example, with a radioactive, biotinylated, or fluorescent tag. Preferably, probes are designed based upon an identifying sequence of any one of the polynucleotide sequences provided herein. More preferably, probes are designed based on a contiguous sequence of one of the subject polynucleotides that remain unmasked following application of a masking program for masking low complexity (e.g., XBLAST, RepeatMasker, etc.) to the sequence, i.e., one would select an unmasked region, as indicated by the polynucleotides outside the poly-n stretches of the masked sequence produced by the masking program.

[0068] The polynucleotides of interest in the subject invention are isolated and obtained in substantial purity, generally as other than an intact chromosome. Usually, the polynucleotides, either as DNA or RNA, will be obtained substantially free of other naturally-occurring nucleic acid sequences that they are usually associated with, generally being at least about 50%, usually at least about 90% pure and are typically “recombinant”, e.g., flanked by one or more nucleotides with which it is not normally associated on a naturally occurring chromosome.

[0069] The polynucleotides described herein can be provided as a linear molecule or within a circular molecule, and can be provided within autonomously replicating molecules (vectors) or within molecules without replication sequences. Expression of the polynucleotides can be regulated by their own or by other regulatory sequences known in the art. The polynucleotides can be introduced into suitable host cells using a variety of techniques available in the art, such as transferrin polycation-mediated DNA transfer, transfection with naked or encapsulated nucleic acids, liposome-mediated DNA transfer, intracellular transportation of DNA-coated latex beads, protoplast fusion, viral infection, electroporation, gene gun, calcium phosphate-mediated transfection, and the like.

[0070] The nucleic acid compositions described herein can be used to, for example, produce polypeptides, as probes for the detection of mRNA in biological samples (e.g., extracts of human cells) or cDNA produced from such samples, to generate additional copies of the polynucleotides, to generate ribozymes or antisense oligonucleotides, and as single stranded DNA probes or as triple-strand forming oligonucleotides. The probes described herein can be used to, for example, determine the presence or absence of any one of the polynucleotide provided herein or variants thereof in a sample. These and other uses are described in more detail below.

[0071] Polypeptides and Variants Thereof

[0072] The present invention further provides polypeptides encoded by polynucleotides that represent genes that are differentially expressed in cancer cells. Such polypeptides are referred to herein as “polypeptides associated with cancer.” The polypeptides can be used to generate antibodies specific for a polypeptide associated with cancer, which antibodies are in turn useful in diagnostic methods, prognostics methods, therametric methods, and the like as discussed in more detail herein. Polypeptides are also useful as targets for therapeutic intervention, as discussed in more detail herein.

[0073] The polypeptides contemplated by the invention include those encoded by the disclosed polynucleotides and the genes to which these polynucleotides correspond, as well as nucleic acids that, by virtue of the degeneracy of the genetic code, are not identical in sequence to the disclosed polynucleotides. Further polypeptides contemplated by the invention include polypeptides that are encoded by polynucleotides that hybridize to polynucleotide of the sequence listing. Thus, the invention includes within its scope a polypeptide encoded by a polynucleotide having the sequence of any one of the polynucleotide sequences provided herein, or a variant thereof.

[0074] In general, the term “polypeptide” as used herein refers to both the full length polypeptide encoded by the recited polynucleotide, the polypeptide encoded by the gene represented by the recited polynucleotide, as well as portions or fragments thereof. “Polypeptides” also includes variants of the naturally occurring proteins, where such variants are homologous or substantially similar to the naturally occurring protein, and can be of an origin of the same or different species as the naturally occurring protein (e.g., human, murine, or some other species that naturally expresses the recited polypeptide, usually a mammalian species). In general, variant polypeptides have a sequence that has at least about 80%, usually at least about 90%, and more usually at least about 98% sequence identity with a differentially expressed polypeptide described herein, as measured by BLAST 2.0 using the parameters described above. The variant polypeptides can be naturally or non-naturally glycosylated, i.e., the polypeptide has a glycosylation pattern that differs from the glycosylation pattern found in the corresponding naturally occurring protein.

[0075] The invention also encompasses homologs of the disclosed polypeptides (or fragments thereof) where the homologs are isolated from other species, i.e. other animal or plant species, where such homologs, usually mammalian species, e.g. rodents, such as mice, rats; domestic animals, e.g., horse, cow, dog, cat; and humans. By “homolog” is meant a polypeptide having at least about 35%, usually at least about 40% and more usually at least about 60% amino acid sequence identity to a particular differentially expressed protein as identified above, where sequence identity is determined using the BLAST 2.0 algorithm, with the parameters described supra.

[0076] In general, the polypeptides of interest in the subject invention are provided in a non-naturally occurring environment, e.g. are separated from their naturally occurring environment. In certain embodiments, the subject protein is present in a composition that is enriched for the protein as compared to a cell or extract of a cell that naturally produces the protein. As such, isolated polypeptide is provided, where by “isolated” or “in substantially isolated form” is meant that the protein is present in a composition that is substantially free of other polypeptides, where by substantially free is meant that less than 90%, usually less than 60% and more usually less than 50% of the composition is made up of other polypeptides of a cell that the protein is naturally found.

[0077] Also within the scope of the invention are variants; variants of polypeptides include mutants, fragments, and fusions. Mutants can include amino acid substitutions, additions or deletions. The amino acid substitutions can be conservative amino acid substitutions or substitutions to eliminate non-essential amino acids, such as to alter a glycosylation site, a phosphorylation site or an acetylation site, or to minimize misfolding by substitution or deletion of one or more cysteine residues that are not necessary for function. Conservative amino acid substitutions are those that preserve the general charge, hydrophobicity/hydrophilicity, and/or steric bulk of the amino acid substituted.

[0078] Variants can be designed so as to retain or have enhanced biological activity of a particular region of the protein (e.g., a functional domain and/or, where the polypeptide is a member of a protein family, a region associated with a consensus sequence). For example, muteins can be made which are optimized for increased antigenicity, i.e. amino acid variants of a polypeptide may be made that increase the antigenicity of the polypeptide. Selection of amino acid alterations for production of variants can be based upon the accessibility (interior vs. exterior) of the amino acid (see, e.g., Go et al, Int. J. Peptide Protein Res. (1980) 15:211), the thermostability of the variant polypeptide (see, e.g., Querol et al., Prot. Eng. (1996) 9:265), desired glycosylation sites (see, e.g., Olsen and Thomsen, J. Gen. Microbiol. (1991) 137:579), desired disulfide bridges (see, e.g., Clarke et al., Biochemistry (1993) 32:4322; and Wakarchuk et al., Protein Eng. (1994) 7:1379), desired metal binding sites (see, e.g., Toma et al., Biochemistry (1991) 30:97, and Haezerbrouck et al., Protein Eng. (1993) 6:643), and desired substitutions with in proline loops (see, e.g., Masul et al., Appl. Env. Microbiol. (1994) 60:3579). Cysteine-depleted muteins can be produced as disclosed in U.S. Pat. No. 4,959,314. Variants also include fragments of the polypeptides disclosed herein, particularly biologically active fragments and/or fragments corresponding to functional domains. Fragments of interest will typically be at least about 10 aa to at least about 15 aa in length, usually at least about 50 aa in length, and can be as long as 300 aa in length or longer, but will usually not exceed about 1000 aa in length, where the fragment will have a stretch of amino acids that is identical to a polypeptide encoded by a polynucleotide having a sequence of any one of the polynucleotide sequences provided herein, or a homolog thereof. The protein variants described herein are encoded by polynucleotides that are within the scope of the invention. The genetic code can be used to select the appropriate codons to construct the corresponding variants.

[0079] A fragment of a subject polypeptide is, for example, a polypeptide having an amino acid sequence which is a portion of a subject polypeptide e.g. a polypeptide encoded by a subject polynucleotide that is identified by any one of the sequence of SEQ ID NOS 1, 3, 5, 7, 9, 11-13, 15, 16, 18, 20, 22, 24, 26, 27, 29 and 128-1618 or its complement. The polypeptide fragments of the invention are preferably at least about 9 aa, at least about 15 aa, and more preferably at least about 20 aa, still more preferably at least about 30 aa, and even more preferably, at least about 40 aa, at least about 50 aa, at least about 75 aa, at least about 100 aa, at least about 125 aa or at least about 150 aa in length. A fragment “at least 20 aa in length,” for example, is intended to include 20 or more contiguous amino acids from, for example, the polypeptide encoded by a cDNA, in a cDNA clone contained in a deposited library, or a nucleotide sequence shown in SEQ ID NOS:1, 3, 5, 7, 9, 11-13, 15, 16, 18, 20, 22, 24, 26, 27, 29 and 128-1618 or the complementary stand thereof. In this context “about” includes the particularly recited value or a value larger or smaller by several (5, 4, 3, 2, or 1) amino acids. These polypeptide fragments have uses that include, but are not limited to, production of antibodies as discussed herein. Of course, larger fragments (e.g., at least 150, 175, 200, 250, 500, 600, 1000, or 2000 amino acids in length) are also encompassed by the invention.

[0080] Moreover, representative examples of polypeptides fragments of the invention (useful in, for example, as antigens for antibody production), include, for example, fragments comprising, or alternatively consisting of, a sequence from about amino acid number 1-10, 5-10, 10-20, 21-31, 31-40, 41-61, 61-81, 91-120, 121-140, 141-162, 162-200, 201-240, 241-280, 281-320, 321-360, 360-400, 400-450, 451-500, 500-600, 600-700, 700-800, 800-900 and the like. In this context “about” includes the particularly recited range or a range larger or smaller by several (5, 4, 3, 2, or 1) amino acids, at either terminus or at both termini. In some embodiments, these fragments has a functional activity (e.g., biological activity) whereas in other embodiments, these fragments may be used to make an antibody.

[0081] In one example, a polynucleotide having a sequence set forth in the sequence listing, containing no flanking sequences (i.e., consisting of the sequence set forth in the sequence listing), may be cloned into an expression vector having ATG and a stop codon (e.g. any one of the pET vector from Invitrogen, or other similar vectors from other manufactures), and used to express a polypeptide of interest encoded by the polynucleotide in a suitable cell, e.g., a bacterial cell. Accordingly, the polynucleotides may be used to produce polypeptides, and these polypeptides may be used to produce antibodies by known methods described above and below. In many embodiments, the sequence of the encoded polypeptide does not have to be known prior to its expression in a cell. However, if it desirable to know the sequence of the polypeptide, this may be derived from the sequence of the polynucleotide. Using the genetic code, the polynucleotide may be translated by hand, or by computer means. Suitable software for identifying open reading frames and translating them into polypeptide sequences are well know in the art, and include: Lasergene™ from DNAStar (Madison, Wis.), and Vector NTI™ from Informax (Frederick Md.), and the like.

[0082] The amino acid sequences of xemplary polypeptides of the invention are shown in SEQ ID NOS: 2, 4, 6, 8, 10, 14, 17, 19, 21, 23, 25, 28 and 1619-1675.

[0083] Further polypeptide variants may are described in PCT publications WO/00-55173, WO/01-07611 and WO/02-16429

[0084] Vectors, Host Cells and Protein Production

[0085] The present invention also relates to vectors containing the polynucleotide of the present invention, host cells, and the production of polypeptides by recombinant techniques. The vector may be, for example, a phage, plasmid, viral, or retroviral vector. Retroviral vectors may be replication competent or replication defective. In the latter case, viral propagation generally will occur only in complementing host cells.

[0086] The polynucleotides of the invention may be joined to a vector containing a selectable marker for propagation in a host. Generally, a plasmid vector is introduced in a precipitate, such as a calcium phosphate precipitate, or in a complex with a charged lipid. If the vector is a virus, it may be packaged in vitro using an appropriate packaging cell line and then transduced into host cells.

[0087] The polynucleotide insert should be operatively linked to an appropriate promoter, such as the phage lambda PL promoter, the E. coli lac, trp, phoA and tac promoters, the SV40 early and late promoters and promoters of retroviral LTRs, to name a few. Other suitable promoters will be known to the skilled artisan. The expression constructs will further contain sites for transcription initiation, termination, and, in the transcribed region, a ribosome binding site for translation. The coding portion of the transcripts expressed by the constructs will preferably include a translation initiating codon at the beginning and a termination codon (UAA, UGA or UAG) appropriately positioned at the end of the polypeptide to be translated.

[0088] As indicated, the expression vectors will preferably include at least one selectable marker. Such markers include dihydrofolate reductase, G418 or neomycin resistance for eukaryotic cell culture and tetracycline, kanamycin or ampicillin resistance genes for culturing in E. coli and other bacteria.

[0089] Representative examples of appropriate hosts include, but are not limited to, bacterial cells, such as E. coli, Streptomyces and Salmonella typhimurium cells; fungal cells, such as yeast cells (e.g., Saccharomyces cerevisiae or Pichia pastoris (ATCC Accession No. 201178)); insect cells such as Drosophila S2 and Spodoptera Sf9 cells; animal cells such as CHO, COS, 293, and Bowes melanoma cells; and plant cells. Appropriate culture mediums and conditions for the above-described host cells are known in the art.

[0090] Among vectors preferred for use in bacteria include pQE70, pQE60 and pQE-9, available from QIAGEN, Inc.; pBluescript vectors, Phagescript vectors, pNHSA, pNH16a, pNH18A, pNH46A, available from Stratagene Cloning Systems, Inc.; and ptrc99a, pKK223-3, pKK233-3, pDR540, pRITS available from Pharmacia Biotech, Inc. Among preferred eukaryotic vectors are pWLNEO, pSV2CAT, pOG44, pXT1 and pSG available from Stratagene; and pSVK3, pBPV, pMSG and pSVL available from Pharmacia. Preferred expression vectors for use in yeast systems include, but are not limited to pYES2, pYD1, pTEF1/Zeo, pYES2/GS, pPICZ, pGAPZ, pGAPZalph, pPIC9, pPIC3.5, pHIL-D2, pHIL-S1, pPIC3.5K, pPIC9K, and PAO815 (all available from Invitrogen, Carload, Calif.). Other suitable vectors will be readily apparent to the skilled artisan.

[0091] Nucleic acids of interest may be cloned into a suitable vector by route methods. Suitable vectors include plasmids, cosmids, recombinant viral vectors e.g. retroviral vectors, YACs, BACs and the like, phage vectors.

[0092] Introduction of the construct into the host cell can be effected by calcium phosphate transfection, DEAE-dextran mediated transfection, cationic lipid-mediated transfection, electroporation, transduction, infection, or other methods. Such methods are described in many standard laboratory manuals, such as Davis et al., Basic Methods In Molecular Biology (1986). It is specifically contemplated that the polypeptides of the present invention may in fact be expressed by a host cell lacking a recombinant vector.

[0093] A polypeptide of this invention can be recovered and purified from recombinant cell cultures by well-known methods including ammonium sulfate or ethanol precipitation, acid extraction, anion or cation exchange chromatography, phosphocellulose chromatography, hydrophobic interaction chromatography, affinity chromatography, hydroxylapatite chromatography and lectin chromatography. Most preferably, high performance liquid chromatography (“HPLC”) is employed for purification.

[0094] Polypeptides of the present invention can also be recovered from: products purified from natural sources, including bodily fluids, tissues and cells, whether directly isolated or cultured; products of chemical synthetic procedures; and products produced by recombinant techniques from a prokaryotic or eukaryotic host, including, for example, bacterial, yeast higher plant, insect, and mammalian cells. Depending upon the host employed in a recombinant production procedure, the polypeptides of the present invention may be glycosylated or may be non-glycosylated. In addition, polypeptides of the invention may also include an initial modified methionine residue, in some cases as a result of host mediated processes. Thus, it is well known in the art that the N-terminal methionine encoded by the translation initiation codon generally is removed with high efficiency from any protein after translation in all eukaryotic cells. While the N-terminal methionine on most proteins also is efficiently removed in most prokaryotes, for some proteins, this prokaryotic removal process is inefficient, depending on the nature of the amino acid to which the N-terminal methionine is covalently linked.

[0095] Suitable methods and compositions for polypeptide expression may be found in PCT publications WO/00-55173, WO/01-07611 and WO/02-16429, and suitable methods and compositions for production of modified polypeptides may be found in PCT publications WO/00-55173, WO/01-07611 and WO/02-16429.

[0096] Antibodies and Other Polypeptide or Polynucleotide Binding Molecules

[0097] The present invention further provides antibodies, which may be isolated antibodies, that are specific for a polypeptide encoded by a polynucleotide described herein and/or a polypeptide of a gene that corresponds to a polynucleotide described herein. Antibodies can be provided in a composition comprising the antibody and a buffer and/or a pharmaceutically acceptable excipient. Antibodies specific for a polypeptide associated with cancer are useful in a variety of diagnostic and therapeutic methods, as discussed in detail herein.

[0098] Gene products, including polypeptides, mRNA (particularly mRNAs having distinct secondary and/or tertiary structures), cDNA, or complete gene, can be prepared and used for raising antibodies for experimental, diagnostic, and therapeutic purposes. Antibodies may be used to identify a gene corresponding to a polynucleotide. The polynucleotide or related cDNA is expressed as described above, and antibodies are prepared. These antibodies are specific to an epitope on the polypeptide encoded by the polynucleotide, and can precipitate or bind to the corresponding native protein in a cell or tissue preparation or in a cell-free extract of an in vitro expression system.

[0099] Antibodies

[0100] Further polypeptides of the invention relate to antibodies and T-cell antigen receptors (TCR) which immunospecifically bind a subject polypeptide, subject polypeptide fragment, or variant thereof, and/or an epitope thereof (as determined by immunoassays well known in the art for assaying specific antibody-antigen binding). Antibodies of the invention include, but are not limited to, polyclonal, monoclonal, multispecific, human, humanized or chimeric antibodies, single chain antibodies, Fab fragments, F(ab′) fragments, fragments produced by a Fab expression library, anti-idiotypic (anti-Id) antibodies (including, e.g., anti-Id antibodies to antibodies of the invention), and epitope-binding fragments of any of the above. The term “antibody,” as used herein, refers to immunoglobulin molecules and immunologically active portions of immunoglobulin molecules, i.e., molecules that contain an antigen binding site that immunospecifically binds an antigen. The immunoglobulin molecules of the invention can be of any type (e.g., IgG, IgE, IgM, IgD, IgA and IgY), class (e.g., IgG1, IgG2, IgG3, IgG4, IgA1 and IgA2) or subclass of immunoglobulin molecule.

[0101] Most preferably the antibodies are human antigen-binding antibody fragments of the present invention and include, but are not limited to, Fab. Fab′ and F(ab′)2, Fd, single-chain Fvs (scFv), single-chain antibodies, disulfide-linked Fvs (sdFv) and fragments comprising either a V_{L} or V_{H} domain. Antigen-binding antibody fragments, including single-chain antibodies, may comprise the variable region(s) alone or in combination with the entirety or a portion of the following: hinge region, C_{H}1, C_{H}2, and C_{H}3 domains. Also included in the invention are antigen-binding fragments also comprising any combination of variable region(s) with a hinge region, C_{H}1, C_{H}2, and C_{H}3 domains. The antibodies of the invention may be from any animal origin including birds and mammals. Preferably, the antibodies are human, murine (e.g., mouse and rat), donkey, ship rabbit, goat, guinea pig, camel, horse, or chicken. As used herein, “human” antibodies include antibodies having the amino acid sequence of a human immunoglobulin and include antibodies isolated from, human immunoglobulin libraries or from animals transgenic for one or more human immunoglobulin and that do not express endogenous immunoglobulins, as described infra and, for example in, U.S. Pat. No. 5,939,598 by Kucherlapati et al.

[0102] The antibodies of the present invention may be monospecific, bispecific, trispecific or of greater multispecificity. Multispecific antibodies may be specific for different epitopes of a polypeptide of the present invention or may be specific for both a polypeptide of the present invention as well as for a heterologous epitope, such as a heterologous polypeptide or solid support material. See, e.g., PCT publications WO 93/17715; WO 92/08802; WO 91/00360; WO 92/05793; Tutt, et al., J. Immunol. 147:60-69 (1991); U.S. Pat. Nos. 4,474,893; 4,714,681; 4,925,648; 5,573,920; 5,601,819; Kostelny et al., J. Immunol. 148:1547-1553 (1992).

[0103] Antibodies of the present invention may be described or specified in terms of the epitope(s) or portion(s) of a polypeptide of the present invention which they recognize or specifically bind. The epitope(s) or polypeptide portion(s) may be specified as described herein, e.g., by N-terminal and C-terminal positions, or by size in contiguous amino acid residues. Antibodies which specifically bind any epitope or polypeptide of the present invention may also be excluded. Therefore, the present invention includes antibodies that specifically bind polypeptides of the present invention, and allows for the exclusion of the same.

[0104] Antibodies of the present invention may also be described or specified in terms of their cross-reactivity. Antibodies that do not bind any other analog, ortholog, or homolog of a polypeptide of the present invention are included. Antibodies that bind polypeptides with at least 95%, at least 90%, at least 85%, at least 80%, at least 75%, at least 70%, at least 65%, at least 60%, at least 55%, and at least 50% identity (as calculated using methods known in the art and described herein) to a polypeptide of the present invention are also included in the present invention. In specific embodiments, antibodies of the present invention cross-react with murine, rat and/or rabbit homologs of human proteins and the corresponding epitopes thereof. Antibodies that do not bind polypeptides with less than 95%, less than 90%, less than 85%, less than 80%, less than 75%, less than 70%, less than 65%, less than 60%, less than 55%, and less than 50% identity (as calculated using methods known in the art and described herein) to a polypeptide of the present invention are also included in the present invention. In a specific embodiment, the above-described cross-reactivity is with respect to any single specific antigenic or immunogenic polypeptide, or combination(s) of 2, 3, 4, 5, or more of the specific antigenic and/or immunogenic polypeptides disclosed herein. Further included in the present invention are antibodies which bind polypeptides encoded by polynucleotides which hybridize to a polynucleotide of the present invention under stringent hybridization conditions (as described herein). Antibodies of the present invention may also be described or specified in terms of their binding affinity to a polypeptide of the invention. Preferred binding affinities include those with a dissociation constant or Kd less 5×10⁻⁵ M, 10⁻⁵ M, 5×10⁻⁶ M, 10⁻⁶ M, 5×10⁻⁷ M, 10⁻⁷ M, 5×10⁻⁸ M, 10⁻⁸ M, 5×10⁻⁹ M, 10⁻⁹M, 5×10⁻¹⁰ M, 10-10 M, etc.

[0105] The invention also provides antibodies that competitively inhibit binding of an antibody to an epitope of the invention as determined by any method known in the art for determining competitive binding, for example, the immunoassays described herein. In preferred embodiments, the antibody competitively inhibits binding to the epitope by at least 95%, at least 90%, at least 85%, at least 80%, at least 75%, at least 70%, at least 60%, or at least 50%.

[0106] Methods for making screening, assaying, humanizing, and modifying different types of antibody are well known in the art and may be found in PCT publications WO/00-55173, WO/01-07611 and WO/02-16429.

[0107] In addition, the invention further provides polynucleotides comprising a nucleotide sequence encoding an antibody of the invention and fragments thereof. The invention also encompasses polynucleotides that hybridize under stringent or alternatively, under lower stringency hybridization conditions, e.g., as defined supra, to polynucleotides that encode an antibody, preferably, that specifically binds to a polypeptide of the invention, preferably, an antibody that binds to a subject polypeptide.

[0108] The antibodies of the invention can be produced by any method known in the art for the synthesis of antibodies, in particular, by chemical synthesis or preferably, by recombinant expression techniques. Recombinant expression of an antibody of the invention, or fragment, derivative or analog thereof, (e.g., a heavy or light chain of an antibody of the invention or a single chain antibody of the invention), requires construction of an expression vector containing a polynucleotide that encodes the antibody. Once a polynucleotide encoding an antibody molecule or a heavy or light chain of an antibody, or portion thereof (preferably containing the heavy or light chain variable domain), of the invention has been obtained, the vector for the production of the antibody molecule may be produced by recombinant DNA technology using techniques well known in the art. Thus, methods for preparing a protein by expressing a polynucleotide containing an antibody encoding nucleotide sequence are described herein. Methods which are well known to those skilled in the art can be used to construct expression vectors containing antibody coding sequences and appropriate transcriptional and translational control signals. These methods include, for example, in vitro recombinant DNA techniques, synthetic techniques, and in vivo genetic recombination. The invention, thus, provides replicable vectors comprising a nucleotide sequence encoding an antibody molecule of the invention, or a heavy or light chain thereof, or a heavy or light chain variable domain, operably linked to a promoter. Such vectors may include the nucleotide sequence encoding the constant region of the antibody molecule (see, e.g., PCT Publication WO 86/05807; PCT Publication WO 89/01036; and U.S. Pat. No. 5,122,464) and the variable domain of the antibody may be cloned into such a vector for expression of the entire heavy or light chain.

[0109] The expression vector is transferred to a host cell by conventional techniques and the transfected cells are then cultured by conventional techniques to produce an antibody of the invention. Thus, the invention includes host cells containing a polynucleotide encoding an antibody of the invention, or a heavy or light chain thereof, or a single chain antibody of the invention, operably linked to a heterologous promoter. In preferred embodiments for the expression of double-chained antibodies, vectors encoding both the heavy and light chains may be co-expressed in the host cell for expression of the entire immunoglobulin molecule, as detailed below.

[0110] A variety of host-expression vector systems may be utilized to express the antibody molecules of the invention. Such host-expression systems represent vehicles by which the coding sequences of interest may be produced and subsequently purified, but also represent cells which may, when transformed or transfected with the appropriate nucleotide coding sequences, express an antibody molecule of the invention in situ. These include but are not limited to microorganisms such as bacteria (e.g., E. coli, B. subtilis) transformed with recombinant bacteriophage DNA, plasmid DNA or cosmid DNA expression vectors containing antibody coding sequences; yeast (e.g., Saccharomyces, Pichia) transformed with recombinant yeast expression vectors containing antibody coding sequences; insect cell systems infected with recombinant virus expression vectors (e.g., baculovirus) containing antibody coding sequences; plant cell systems infected with recombinant virus expression vectors (e.g., cauliflower mosaic virus, CaMV; tobacco mosaic virus, TMV) or transformed with recombinant plasmid expression vectors (e.g., Ti plasmid) containing antibody coding sequences; or mammalian cell systems (e.g., COS, CHO, BHK, 293, 3T3 cells) harboring recombinant expression constructs containing promoters derived from the genome of mammalian cells (e.g., metallothionein promoter) or from mammalian viruses (e.g., the adenovirus late promoter; the vaccinia virus 7.5K promoter). Preferably, bacterial cells such as Escherichia coli, and more preferably, eukaryotic cells, especially for the expression of whole recombinant antibody molecule, are used for the expression of a recombinant antibody molecule. For example, mammalian cells such as Chinese hamster ovary cells (CHO), in conjunction with a vector such as the major intermediate early gene promoter element from human cytomegalovirus is an effective expression system for antibodies (Foecking et al., Gene 45:101 (1986); Cockett et al., Bio/Technology 8:2 (1990)).

[0111] Antibodies production is well known in the art. Exemplary methods and compositions for making antibodies may be found in PCT publications WO/00-55173, WO/01-07611 and WO/02-16429.

[0112] Immunophenotyping

[0113] The antibodies of the invention may be utilized for immunophenotyping of cell lines and biological samples. The translation product of the gene of the present invention may be useful as a cell specific marker, or more specifically as a cellular marker that is differentially expressed at various stages of differentiation and/or maturation of particular cell types. Monoclonal antibodies directed against a specific epitope, or combination of epitopes, will allow for the screening of cellular populations expressing the marker. Various techniques can be utilized using monoclonal antibodies to screen for cellular populations expressing the marker(s), and include magnetic separation using antibody-coated magnetic beads, “panning” with antibody attached to a solid matrix (i.e., plate), and flow cytometry (See, e.g., U.S. Pat. No. 5,985,660; and Morrison et al. Cell, 96:737-49 (1999)).

[0114] These techniques allow for the screening of particular populations of cells, such as might be found with hematological malignancies (i.e. minimal residual disease (MRD) in acute leukemic patients) and “non-self cells in transplantations to prevent Graft-versus-Host Disease (GVHD). Alternatively, these techniques allow for the screening of hematopoietic stem and progenitor cells capable of undergoing proliferation and/or differentiation, as might be found in human umbilical cord blood.

Kits

[0115] Also provided by the subject invention are kits for practicing the subject methods, as described above. The subject kits include at least one or more of: a subject nucleic acid, isolated polypeptide or an antibody thereto. Other optional components of the kit include: restriction enzymes, control primers and plasmids; buffers, cells, carriers adjuvents etc. The nucleic acids of the kit may also have restrictions sites, multiple cloning sites, primer sites, etc to facilitate their ligation other plasmids. The various components of the kit may be present in separate containers or certain compatible components may be precombined into a single container, as desired. In many embodiments, kits with unit doses of the active agent, e.g. in oral or injectable doses, are provided. In certain embodiments, controls, such as samples from a cancerous or non-cancerous cell are provided by the invention. Further embodiments of the kit include an antibody for a subject polypeptide and a chemotherapeutic agent to be used in combination with the polypeptide as a treatment.

[0116] In addition to above-mentioned components, the subject kits typically further include instructions for using the components of the kit to practice the subject methods. The instructions for practicing the subject methods are generally recorded on a suitable recording medium. For example, the instructions may be printed on a substrate, such as paper or plastic, etc. As such, the instructions may be present in the kits as a package insert, in the labeling of the container of the kit or components thereof (i.e., associated with the packaging or subpackaging) etc. In other embodiments, the instructions are present as an electronic storage data file present on a suitable computer readable storage medium, e.g. CD-ROM, diskette, etc. In yet other embodiments, the actual instructions are not present in the kit, but means for obtaining the instructions from a remote source, e.g. via the internet, are provided. An example of this embodiment is a kit that includes a web address where the instructions can be viewed and/or from which the instructions can be downloaded. As with the instructions, this means for obtaining the instructions is recorded on a suitable substrate.

### Computer-Related Embodiments

[0117] In general, a library of polynucleotides is a collection of sequence information, which information is provided in either biochemical form (e.g., as a collection of polynucleotide molecules), or in electronic form (e.g., as a collection of polynucleotide sequences stored in a computer-readable form, as in a computer system and/or as part of a computer program). The sequence information of the polynucleotides can be used in a variety of ways, e.g., as a resource for gene discovery, as a representation of sequences expressed in a selected cell type (e.g., cell type markers), and/or as markers of a given disease or disease state. For example, in the instant case, the sequences of polynucleotides and polypeptides corresponding to genes differentially expressed in cancer, as well as the nucleic acid and amino acid sequences of the genes themselves, can be provided in electronic form in a computer database.

[0118] In general, a disease marker is a representation of a gene product that is present in all cells affected by disease either at an increased or decreased level relative to a normal cell (e.g., a cell of the same or similar type that is not substantially affected by disease). For example, a polynucleotide sequence in a library can be a polynucleotide that represents an mRNA, polypeptide, or other gene product encoded by the polynucleotide, that is either overexpressed or underexpressed in a cancerous cell affected by cancer relative to a normal (i.e., substantially disease-free) cell.

[0119] The nucleotide sequence information of the library can be embodied in any suitable form, e.g., electronic or biochemical forms. For example, a library of sequence information embodied in electronic form comprises an accessible computer data file (or, in biochemical form, a collection of nucleic acid molecules) that contains the representative nucleotide sequences of genes that are differentially expressed (e.g., overexpressed or underexpressed) as between, for example, i) a cancerous cell and a normal cell; ii) a cancerous cell and a dysplastic cell; iii) a cancerous cell and a cell affected by a disease or condition other than cancer; iv) a metastatic cancerous cell and a normal cell and/or non-metastatic cancerous cell; v) a malignant cancerous cell and a non-malignant cancerous cell (or a normal cell) and/or vi) a dysplastic cell relative to a normal cell. Other combinations and comparisons of cells affected by various diseases or stages of disease will be readily apparent to the ordinarily skilled artisan. Biochemical embodiments of the library include a collection of nucleic acids that have the sequences of the genes in the library, where the nucleic acids can correspond to the entire gene in the library or to a fragment thereof, as described in greater detail below.

[0120] The polynucleotide libraries of the subject invention generally comprise sequence information of a plurality of polynucleotide sequences, where at least one of the polynucleotides has a sequence of any of sequence described herein. By plurality is meant at least 2, usually at least 3 and can include up to all of the sequences described herein. The length and number of polynucleotides in the library will vary with the nature of the library, e.g., if the library is an oligonucleotide array, a cDNA array, a computer database of the sequence information, etc.

[0121] Where the library is an electronic library, the nucleic acid sequence information can be present in a variety of media. “Media” refers to a manufacture, other than an isolated nucleic acid molecule, that contains the sequence information of the present invention. Such a manufacture provides the genome sequence or a subset thereof in a form that can be examined by means not directly applicable to the sequence as it exists in a nucleic acid. For example, the nucleotide sequence of the present invention, e.g. the nucleic acid sequences of any of the polynucleotides of the sequences described herein, can be recorded on computer readable media, e.g. any medium that can be read and accessed directly by a computer. Such media include, but are not limited to: magnetic storage media, such as a floppy disc, a hard disc storage medium, and a magnetic tape; optical storage media such as CD-ROM; electrical storage media such as RAM and ROM; and hybrids of these categories such as magnetic/optical storage media.

[0122] One of skill in the art can readily appreciate how any of the presently known computer readable mediums can be used to create a manufacture comprising a recording of the present sequence information. “Recorded” refers to a process for storing information on computer readable medium, using any such methods as known in the art. Any convenient data storage structure can be chosen, based on the means used to access the stored information. A variety of data processor programs and formats can be used for storage, e.g. word processing text file, database format, etc. In addition to the sequence information, electronic versions of libraries comprising one or more sequence described herein can be provided in conjunction or connection with other computer-readable information and/or other types of computer-readable files (e.g., searchable files, executable files, etc, including, but not limited to, for example, search program software, etc.).

[0123] By providing the nucleotide sequence in computer readable form, the information can be accessed for a variety of purposes. Computer software to access sequence information (e.g. the NCBI sequence database) is publicly available. For example, the gapped BLAST (Altschul et al., Nucleic Acids Res. (1997) 25:3389-3402) and BLAZE (Brutlag et al., Comp. Chem. (1993) 17:203) search algorithms on a Sybase system, or the TeraBLAST (TimeLogic, Crystal Bay, Nev.) program optionally running on a specialized computer platform available from TimeLogic, can be used to identify open reading frames (ORFs) within the genome that contain homology to ORFs from other organisms.

[0124] As used herein, “a computer-based system” refers to the hardware means, software means, and data storage means used to analyze the nucleotide sequence information of the present invention. The minimum hardware of the computer-based systems of the present invention comprises a central processing unit (CPU), input means, output means, and data storage means. A skilled artisan can readily appreciate that any one of the currently available computer-based system are suitable for use in the present invention. The data storage means can comprise any manufacture comprising a recording of the present sequence information as described above, or a memory access means that can access such a manufacture.

[0125] “Search means” refers to one or more programs implemented on the computer-based system, to compare a target sequence or target structural motif, or expression levels of a polynucleotide in a sample, with the stored sequence information. Search means can be used to identify fragments or regions of the genome that match a particular target sequence or target motif. A variety of known algorithms are publicly known and commercially available, e.g. MacPattern (EMBL), TeraBLAST (TimeLogic), BLASTN and BLASTX (NCBI). A “target sequence” can be any polynucleotide or amino acid sequence of six or more contiguous nucleotides or two or more amino acids, preferably from about 10 to 100 amino acids or from about 30 to 300 nt. A variety of means for comparing nucleic acids or polypeptides may be used to compare accomplish a sequence comparison (e.g., to analyze target sequences, target motifs, or relative expression levels) with the data storage means. A skilled artisan can readily recognize that any one of the publicly available homology search programs can be used to search the computer based systems of the present invention to compare of target sequences and motifs. Computer programs to analyze expression levels in a sample and in controls are also known in the art.

[0126] A “target structural motif,” or “target motif,” refers to any rationally selected sequence or combination of sequences in which the sequence(s) are chosen based on a three-dimensional configuration that is formed upon the folding of the target motif, or on consensus sequences of regulatory or active sites. There are a variety of target motifs known in the art. Protein target motifs include, but are not limited to, enzyme active sites and signal sequences, kinase domains, receptor binding domains, SH2 domains, SH3 domains, phosphorylation sites, protein interaction domains, transmembrane domains, etc. Nucleic acid target motifs include, but are not limited to, hairpin structures, promoter sequences and other expression elements such as binding sites for transcription factors.

[0127] A variety of structural formats for the input and output means can be used to input and output the information in the computer-based systems of the present invention. One format for an output means ranks the relative expression levels of different polynucleotides. Such presentation provides a skilled artisan with a ranking of relative expression levels to determine a gene expression profile. A gene expression profile can be generated from, for example, a cDNA library prepared from mRNA isolated from a test cell suspected of being cancerous or pre-cancerous, comparing the sequences or partial sequences of the clones against the sequences in an electronic database, where the sequences of the electronic database represent genes differentially expressed in a cancerous cell, e.g., a cancerous breast cell. The number of clones having a sequence that has substantial similarity to a sequence that represents a gene differentially expressed in a cancerous cell is then determined, and the number of clones corresponding to each of such genes is determined. An increased number of clones that correspond to differentially expressed gene is present in the cDNA library of the test cell (relative to, for example, the number of clones expected in a cDNA of a normal cell) indicates that the test cell is cancerous.

[0128] As discussed above, the “library” as used herein also encompasses biochemical libraries of the polynucleotides of the sequences described herein, e.g., collections of nucleic acids representing the provided polynucleotides. The biochemical libraries can take a variety of forms, e.g., a solution of cDNAs, a pattern of probe nucleic acids stably associated with a surface of a solid support (i.e., an array) and the like. Of particular interest are nucleic acid arrays in which one or more of the genes described herein is represented by a sequence on the array. By array is meant an article of manufacture that has at least a substrate with at least two distinct nucleic acid targets on one of its surfaces, where the number of distinct nucleic acids can be considerably higher, typically being at least 10 nt, usually at least 20 nt and often at least 25 nt. A variety of different array formats have been developed and are known to those of skill in the art. The arrays of the subject invention find use in a variety of applications, including gene expression analysis, drug screening, mutation analysis and the like, as disclosed in the above-listed exemplary patent documents.

[0129] In addition to the above nucleic acid libraries, analogous libraries of polypeptides are also provided, where the polypeptides of the library will represent at least a portion of the polypeptides encoded by a gene corresponding to a sequence described herein.

[0130] Diagnostic and Other Methods Involving Detection of Differentially Expressed Genes

[0131] The present invention provides methods of using the polynucleotides described herein in, for example, diagnosis of cancer and classification of cancer cells according to expression profiles. In specific non-limiting embodiments, the methods are useful for detecting cancer cells, facilitating diagnosis of cancer and the severity of a cancer (e.g., tumor grade, tumor burden, and the like) in a subject, facilitating a determination of the prognosis of a subject, and assessing the responsiveness of the subject to therapy (e.g., by providing a measure of therapeutic effect through, for example, assessing tumor burden during or following a chemotherapeutic regimen). Detection can be based on detection of a polynucleotide that is differentially expressed in a cancer cell, and/or detection of a polypeptide encoded by a polynucleotide that is differentially expressed in a cancer cell (“a polypeptide associated with cancer”). The detection methods of the invention can be conducted in vitro or in vivo, on isolated cells, or in whole tissues or a bodily fluid, e.g., blood, plasma, serum, urine, and the like).

[0132] In general, methods of the invention involving detection of a gene product (e.g., mRNA, cDNA generated from such mRNA, and polypeptides) involve contacting a sample with a probe specific for the gene product of interest. “Probe” as used herein in such methods is meant to refer to a molecule that specifically binds a gene product of interest (e.g., the probe binds to the target gene product with a specificity sufficient to distinguish binding to target over non-specific binding to non-target (background) molecules). “Probes” include, but are not necessarily limited to, nucleic acid probes (e.g., DNA, RNA, modified nucleic acid, and the like), antibodies (e.g., antibodies, antibody fragments that retain binding to a target epitope, single chain antibodies, and the like), or other polypeptide, peptide, or molecule (e.g., receptor ligand) that specifically binds a target gene product of interest.

[0133] The probe and sample suspected of having the gene product of interest are contacted under conditions suitable for binding of the probe to the gene product. For example, contacting is generally for a time sufficient to allow binding of the probe to the gene product (e.g., from several minutes to a few hours), and at a temperature and conditions of osmolarity and the like that provide for binding of the probe to the gene product at a level that is sufficiently distinguishable from background binding of the probe (e.g., under conditions that minimize non-specific binding). Suitable conditions for probe-target gene product binding can be readily determined using controls and other techniques available and known to one of ordinary skill in the art.

[0134] In this embodiment, the probe can be an antibody or other polypeptide, peptide, or molecule (e.g., receptor ligand) that specifically binds a target polypeptide of interest.

[0135] The detection methods can be provided as part of a kit. Thus, the invention further provides kits for detecting the presence and/or a level of a polynucleotide that is differentially expressed in a cancer cell (e.g., by detection of an mRNA encoded by the differentially expressed gene of interest), and/or a polypeptide encoded thereby, in a biological sample. Procedures using these kits can be performed by clinical laboratories, experimental laboratories, medical practitioners, or private individuals. The kits of the invention for detecting a polypeptide encoded by a polynucleotide that is differentially expressed in a cancer cell comprise a moiety that specifically binds the polypeptide, which may be a specific antibody. The kits of the invention for detecting a polynucleotide that is differentially expressed in a cancer cell comprise a moiety that specifically hybridizes to such a polynucleotide. The kit may optionally provide additional components that are useful in the procedure, including, but not limited to, buffers, developing reagents, labels, reacting surfaces, means for detection, control samples, standards, instructions, and interpretive information.

[0136] Detecting a Polypeptide Encoded by a Polynucleotide that is Differentially Expressed in a Cancer Cell

[0137] In some embodiments, methods are provided for a detecting cancer cell by detecting in a cell, a polypeptide encoded by a gene differentially expressed in a cancer cell. Any of a variety of known methods can be used for detection, including, but not limited to, immunoassay, using an antibody specific for the encoded polypeptide, e.g., by enzyme-linked immunosorbent assay (ELISA), radioimmunoassay (RIA), and the like; and functional assays for the encoded polypeptide, e.g., binding activity or enzymatic activity.

[0138] For example, an immunofluorescence assay can be easily performed on cells without first isolating the encoded polypeptide. The cells are first fixed onto a solid support, such as a microscope slide or microtiter well. This fixing step can permeabilize the cell membrane. The permeablization of the cell membrane permits the polypeptide-specific probe (e.g, antibody) to bind. Alternatively, where the polypeptide is secreted or membrane-bound, or is otherwise accessible at the cell-surface (e.g., receptors, and other molecule stably-associated with the outer cell membrane or otherwise stably associated with the cell membrane, such permeabilization may not be necessary.

[0139] Next, the fixed cells are exposed to an antibody specific for the encoded polypeptide. To increase the sensitivity of the assay, the fixed cells may be further exposed to a second antibody, which is labeled and binds to the first antibody, which is specific for the encoded polypeptide. Typically, the secondary antibody is detectably labeled, e.g., with a fluorescent marker. The cells which express the encoded polypeptide will be fluorescently labeled and easily visualized under the microscope. See, for example, Hashido et al. (1992) Biochem. Biophys. Res. Comm. 187:1241-1248.

[0140] As will be readily apparent to the ordinarily skilled artisan upon reading the present specification, the detection methods and other methods described herein can be varied. Such variations are within the intended scope of the invention. For example, in the above detection scheme, the probe for use in detection can be immobilized on a solid support, and the test sample contacted with the immobilized probe. Binding of the test sample to the probe can then be detected in a variety of ways, e.g., by detecting a detectable label bound to the test sample.

[0141] The present invention further provides methods for detecting the presence of and/or measuring a level of a polypeptide in a biological sample, which polypeptide is encoded by a polynucleotide that represents a gene differentially expressed in cancer, particularly in a polynucleotide that represents a gene differentially cancer cell, using a probe specific for the encoded polypeptide. In this embodiment, the probe can be a an antibody or other polypeptide, peptide, or molecule (e.g., receptor ligand) that specifically binds a target polypeptide of interest.

[0142] The methods generally comprise: a) contacting the sample with an antibody specific for a differentially expressed polypeptide in a test cell; and b) detecting binding between the antibody and molecules of the sample. The level of antibody binding (either qualitative or quantitative) indicates the cancerous state of the cell. For example, where the differentially expressed gene is increased in cancerous cells, detection of an increased level of antibody binding to the test sample relative to antibody binding level associated with a normal cell indicates that the test cell is cancerous.

[0143] Suitable controls include a sample known not to contain the encoded polypeptide; and a sample contacted with an antibody not specific for the encoded polypeptide, e.g., an anti-idiotype antibody. A variety of methods to detect specific antibody-antigen interactions are known in the art and can be used in the method, including, but not limited to, standard immunohistological methods, immunoprecipitation, an enzyme immunoassay, and a radioimmunoassay.

[0144] In general, the specific antibody will be detectably labeled, either directly or indirectly. Direct labels include radioisotopes; enzymes whose products are detectable (e.g., luciferase, β-galactosidase, and the like); fluorescent labels (e.g., fluorescein isothiocyanate, rhodamine, phycoerythrin, and the like); fluorescence emitting metals, e.g., ¹⁵²Eu, or others of the lanthanide series, attached to the antibody through metal chelating groups such as EDTA; chemiluminescent compounds, e.g., luminol, isoluminol, acridinium salts, and the like; bioluminescent compounds, e.g., luciferin, aequorin (green fluorescent protein), and the like.

[0145] The antibody may be attached (coupled) to an insoluble support, such as a polystyrene plate or a bead. Indirect labels include second antibodies specific for antibodies specific for the encoded polypeptide (“first specific antibody”), wherein the second antibody is labeled as described above; and members of specific binding pairs, e.g., biotin-avidin, and the like. The biological sample may be brought into contact with and immobilized on a solid support or carrier, such as nitrocellulose, that is capable of immobilizing cells, cell particles, or soluble proteins. The support may then be washed with suitable buffers, followed by contacting with a detectably-labeled first specific antibody. Detection methods are known in the art and will be chosen as appropriate to the signal emitted by the detectable label. Detection is generally accomplished in comparison to suitable controls, and to appropriate standards.

[0146] In some embodiments, the methods are adapted for use in vivo, e.g., to locate or identify sites where cancer cells are present. In these embodiments, a detectably-labeled moiety, e.g., an antibody, which is specific for a cancer-associated polypeptide is administered to an individual (e.g., by injection), and labeled cells are located using standard imaging techniques, including, but not limited to, magnetic resonance imaging, computed tomography scanning, and the like. In this manner, cancer cells are differentially labeled.

[0147] Detecting a Polynucleotide that Represents a Gene Differentially Expressed in a Cancer Cell

[0148] In some embodiments, methods are provided for detecting a cancer cell by detecting expression in the cell of a transcript or that is differentially expressed in a cancer cell. Any of a variety of known methods can be used for detection, including, but not limited to, detection of a transcript by hybridization with a polynucleotide that hybridizes to a polynucleotide that is differentially expressed in a cancer cell; detection of a transcript by a polymerase chain reaction using specific oligonucleotide primers; in situ hybridization of a cell using as a probe a polynucleotide that hybridizes to a gene that is differentially expressed in a cancer cell and the like.

[0149] In many embodiments, the levels of a subject gene product are measured. By measured is meant qualitatively or quantitatively estimating the level of the gene product in a first biological sample either directly (e.g. by determining or estimating absolute levels of gene product) or relatively by comparing the levels to a second control biological sample. In many embodiments the second control biological sample is obtained from an individual not having not having cancer. As will be appreciated in the art, once a standard control level of gene expression is known, it can be used repeatedly as a standard for comparison. Other control samples include samples of cancerous tissue.

[0150] The methods can be used to detect and/or measure mRNA levels of a gene that is differentially expressed in a cancer cell. In some embodiments, the methods comprise: a) contacting a sample with a polynucleotide that corresponds to a differentially expressed gene described herein under conditions that allow hybridization; and b) detecting hybridization, if any. Detection of differential hybridization, when compared to a suitable control, is an indication of the presence in the sample of a polynucleotide that is differentially expressed in a cancer cell. Appropriate controls include, for example, a sample that is known not to contain a polynucleotide that is differentially expressed in a cancer cell. Conditions that allow hybridization are known in the art, and have been described in more detail above.

[0151] Detection can also be accomplished by any known method, including, but not limited to, in situ hybridization, PCR (polymerase chain reaction), RT-PCR (reverse transcription-PCR), and “Northern” or RNA blotting, arrays, microarrays, etc, or combinations of such techniques, using a suitably labeled polynucleotide. A variety of labels and labeling methods for polynucleotides are known in the art and can be used in the assay methods of the invention. Specific hybridization can be determined by comparison to appropriate controls.

[0152] Polynucleotides described herein are used for a variety of purposes, such as probes for detection of and/or measurement of, transcription levels of a polynucleotide that is differentially expressed in a cancer cell. Additional disclosure about preferred regions of the disclosed polynucleotide sequences is found in the Examples. A probe that hybridizes specifically to a polynucleotide disclosed herein should provide a detection signal at least 2-, 5-, 10-, or 20-fold higher than the background hybridization provided with other unrelated sequences. It should be noted that “probe” as used in this context of detection of nucleic acid is meant to refer to a polynucleotide sequence used to detect a differentially expressed gene product in a test sample. As will be readily appreciated by the ordinarily skilled artisan, the probe can be detectably labeled and contacted with, for example, an array comprising immobilized polynucleotides obtained from a test sample (e.g., mRNA). Alternatively, the probe can be immobilized on an array and the test sample detectably labeled. These and other variations of the methods of the invention are well within the skill in the art and are within the scope of the invention.

[0153] Labeled nucleic acid probes may be used to detect expression of a gene corresponding to the provided polynucleotide. In Northern blots, mRNA is separated electrophoretically and contacted with a probe. A probe is detected as hybridizing to an mRNA species of a particular size. The amount of hybridization can be quantitated to determine relative amounts of expression, for example under a particular condition. Probes are used for in situ hybridization to cells to detect expression. Probes can also be used in vivo for diagnostic detection of hybridizing sequences. Probes are typically labeled with a radioactive isotope. Other types of detectable labels can be used such as chromophores, fluorophores, and enzymes. Other examples of nucleotide hybridization assays are described in WO92/02526 and U.S. Pat. No. 5,124,246.

[0154] PCR is another means for detecting small amounts of target nucleic acids, methods for which may be found in Sambrook, et al. Molecular Cloning: A Laboratory Manual, CSH Press 1989, pp. 14.2-14.33.

[0155] A detectable label may be included in the amplification reaction. Suitable detectable labels include fluorochromes, (e.g. fluorescein isothiocyanate (FITC), rhodamine, Texas Red, phycoerythrin, allophycocyanin, 6-carboxyfluorescein (6-FAM), 2′,7′-dimethoxy-4′,5′-dichloro-6-carboxyfluorescein, 6-carboxy-X-rhodamine (ROX), 6-carboxy-2′,4′,7′,4,7-hexachlorofluorescein (HEX), 5-carboxyfluorescein (5-FAM) or N,N,N′,N′-tetramethyl-6-carboxyrhodamine (TAMRA)), radioactive labels, (e.g. ³²P, ³⁵S, ³H, etc.), and the like. The label may be a two stage system, where the polynucleotides is conjugated to biotin, haptens, etc. having a high affinity binding partner, e.g. avidin, specific antibodies, etc., where the binding partner is conjugated to a detectable label. The label may be conjugated to one or both of the primers. Alternatively, the pool of nucleotides used in the amplification is labeled, so as to incorporate the label into the amplification product.

[0156] Arrays

[0157] Polynucleotide arrays provide a high throughput technique that can assay a large number of polynucleotides or polypeptides in a sample. This technology can be used as a tool to test for differential expression.

[0158] A variety of methods of producing arrays, as well as variations of these methods, are known in the art and contemplated for use in the invention. For example, arrays can be created by spotting polynucleotide probes onto a substrate (e.g., glass, nitrocellulose, etc.) in a two-dimensional matrix or array having bound probes. The probes can be bound to the substrate by either covalent bonds or by non-specific interactions, such as hydrophobic interactions.

[0159] Samples of polynucleotides can be detectably labeled (e.g., using radioactive or fluorescent labels) and then hybridized to the probes. Double stranded polynucleotides, comprising the labeled sample polynucleotides bound to probe polynucleotides, can be detected once the unbound portion of the sample is washed away. Alternatively, the polynucleotides of the test sample can be immobilized on the array, and the probes detectably labeled. Techniques for constructing arrays and methods of using these arrays are described in, for example, Schena et al. (1996) Proc Natl Acad Sci USA. 93(20):10614-9; Schena et al. (1995) Science 270(5235):467-70; Shalon et al. (1996) Genome Res. 6(7):639-45, U.S. Pat. No. 5,807,522, EP 799 897; WO 97/29212; WO 97/27317; EP 785 280; WO 97/02357; U.S. Pat. No. 5,593,839; U.S. Pat. No. 5,578,832; EP 728 520; U.S. Pat. No. 5,599,695; EP 721 016; U.S. Pat. No. 5,556,752; WO 95/22058; and U.S. Pat. No. 5,631,734. In most embodiments, the “probe” is detectably labeled. In other embodiments, the probe is immobilized on the array and not detectably labeled.

[0160] Arrays can be used, for example, to examine differential expression of genes and can be used to determine gene function. For example, arrays can be used to detect differential expression of a gene corresponding to a polynucleotide described herein, where expression is compared between a test cell and control cell (e.g., cancer cells and normal cells). For example, high expression of a particular message in a cancer cell, which is not observed in a corresponding normal cell, can indicate a cancer specific gene product. Exemplary uses of arrays are further described in, for example, Pappalarado et al., Sem. Radiation Oncol. (1998) 8:217; and Ramsay, Nature Biotechnol. (1998) 16:40. Furthermore, many variations on methods of detection using arrays are well within the skill in the art and within the scope of the present invention. For example, rather than immobilizing the probe to a solid support, the test sample can be immobilized on a solid support which is then contacted with the probe.

[0161] Diagnosis, Prognosis, Assessment of Therapy (Therametrics), and Management of Cancer

[0162] The polynucleotides described herein, as well as their gene products and corresponding genes and gene products, are of particular interest as genetic or biochemical markers (e.g., in blood or tissues) that will detect the earliest changes along the carcinogenesis pathway and/or to monitor the efficacy of various therapies and preventive interventions.

[0163] For example, the level of expression of certain polynucleotides can be indicative of a poorer prognosis, and therefore warrant more aggressive chemo- or radio-therapy for a patient or vice versa. The correlation of novel surrogate tumor specific features with response to treatment and outcome in patients can define prognostic indicators that allow the design of tailored therapy based on the molecular profile of the tumor. These therapies include antibody targeting, antagonists (e.g., small molecules), and gene therapy.

[0164] Determining expression of certain polynucleotides and comparison of a patient's profile with known expression in normal tissue and variants of the disease allows a determination of the best possible treatment for a patient, both in terms of specificity of treatment and in terms of comfort level of the patient. Surrogate tumor markers, such as polynucleotide expression, can also be used to better classify, and thus diagnose and treat, different forms and disease states of cancer. Two classifications widely used in oncology that can benefit from identification of the expression levels of the genes corresponding to the polynucleotides described herein are staging of the cancerous disorder, and grading the nature of the cancerous tissue.

[0165] The polynucleotides that correspond to differentially expressed genes, as well as their encoded gene products, can be useful to monitor patients having or susceptible to cancer to detect potentially malignant events at a molecular level before they are detectable at a gross morphological level. In addition, the polynucleotides described herein, as well as the genes corresponding to such polynucleotides, can be useful as therametrics, e.g., to assess the effectiveness of therapy by using the polynucleotides or their encoded gene products, to assess, for example, tumor burden in the patient before, during, and after therapy.

[0166] Furthermore, a polynucleotide identified as corresponding to a gene that is differentially expressed in, and thus is important for, one type of cancer can also have implications for development or risk of development of other types of cancer, e.g., where a polynucleotide represents a gene differentially expressed across various cancer types. Thus, for example, expression of a polynucleotide corresponding to a gene that has clinical implications for cancer can also have clinical implications for metastatic breast cancer, colon cancer, or ovarian cancer, etc.

[0167] Staging. Staging is a process used by physicians to describe how advanced the cancerous state is in a patient. Staging assists the physician in determining a prognosis, planning treatment and evaluating the results of such treatment. Staging systems vary with the types of cancer, but generally involve the following “TNM” system: the type of tumor, indicated by T; whether the cancer has metastasized to nearby lymph nodes, indicated by N; and whether the cancer has metastasized to more distant parts of the body, indicated by M. Generally, if a cancer is only detectable in the area of the primary lesion without having spread to any lymph nodes it is called Stage I. If it has spread only to the closest lymph nodes, it is called Stage II. In Stage III, the cancer has generally spread to the lymph nodes in near proximity to the site of the primary lesion. Cancers that have spread to a distant part of the body, such as the liver, bone, brain or other site, are Stage IV, the most advanced stage.

[0168] The polynucleotides and corresponding genes and gene products described herein can facilitate fine-tuning of the staging process by identifying markers for the aggressiveness of a cancer, e.g. the metastatic potential, as well as the presence in different areas of the body. Thus, a Stage II cancer with a polynucleotide signifying a high metastatic potential cancer can be used to change a borderline Stage II tumor to a Stage III tumor, justifying more aggressive therapy. Conversely, the presence of a polynucleotide signifying a lower metastatic potential allows more conservative staging of a tumor.

[0169] One type of breast cancer is ductal carcinoma in situ (DCIS): DCIS is when the breast cancer cells are completely contained within the breast ducts (the channels in the breast that carry milk to the nipple), and have not spread into the surrounding breast tissue. This may also be referred to as non-invasive or intraductal cancer, as the cancer cells have not yet spread into the surrounding breast tissue and so usually have not spread into any other part of the body.

[0170] Lobular carcinoma in situ breast cancer (LCIS) means that cell changes are found in the lining of the lobules of the breast. It can be present in both breasts. It is also referred to as non-invasive cancer as it has not spread into the surrounding breast tissue.

[0171] Invasive breast cancer can be staged as follows: Stage 1 tumours: these measure less than two centimetres. The lymph glands in the armpit are not affected and there are no signs that the cancer has spread elsewhere in the body; Stage 2 tumours: these measure between two and five centimetres, or the lymph glands in the armpit are affected, or both. However, there are no signs that the cancer has spread further; Stage 3 tumours: these are larger than five centimetres and may be attached to surrounding structures such as the muscle or skin. The lymph glands are usually affected, but there are no signs that the cancer has spread beyond the breast or the lymph glands in the armpit; Stage 4 tumours: these are of any size, but the lymph glands are usually affected and the cancer has spread to other parts of the body. This is secondary breast cancer.

[0172] Grading of cancers. Grade is a term used to describe how closely a tumor resembles normal tissue of its same type. The microscopic appearance of a tumor is used to identify tumor grade based on parameters such as cell morphology, cellular organization, and other markers of differentiation. As a general rule, the grade of a tumor corresponds to its rate of growth or aggressiveness, with undifferentiated or high-grade tumors generally being more aggressive than well-differentiated or low-grade tumors.

[0173] The polynucleotides of the Sequence Listing, and their corresponding genes and gene products, can be especially valuable in determining the grade of the tumor, as they not only can aid in determining the differentiation status of the cells of a tumor, they can also identify factors other than differentiation that are valuable in determining the aggressiveness of a tumor, such as metastatic potential.

[0174] Low grade means that the cancer cells look very like the normal cells. They are usually slowly growing and are less likely to spread. In high grade tumors the cells look very abnormal. They are likely to grow more quickly and are more likely to spread.

[0175] Assessment of proliferation of cells in tumor. The differential expression level of the polynucleotides described herein can facilitate assessment of the rate of proliferation of tumor cells, and thus provide an indicator of the aggressiveness of the rate of tumor growth. For example, assessment of the relative expression levels of genes involved in cell cycle can provide an indication of cellular proliferation, and thus serve as a marker of proliferation.

[0176] Detection of Cancer.

[0177] The polynucleotides corresponding to genes that exhibit the appropriate expression pattern can be used to detect cancer in a subject. The expression of appropriate polynucleotides can be used in the diagnosis, prognosis and management of cancer. Detection of cancer can be determined using expression levels of any of these sequences alone or in combination with the levels of expression of other known cancer genes. Determination of the aggressive nature and/or the metastatic potential of a cancer can be determined by comparing levels of one or more gene products of the genes corresponding to the polynucleotides described herein, and comparing total levels of another sequence known to vary in cancerous tissue, e.g., expression of p53, DCC, ras, FAP (see, e.g., Fearon E R, et al., Cell (1990) 61(5):759; Hamilton S R et al., Cancer (1993) 72:957; Bodmer W, et al., Nat Genet. (1994) 4(3):217; Fearon E R, Ann N Y Acad Sci. (1995) 768:101). For example, development of cancer can be detected by examining the level of expression of a gene corresponding to a polynucleotides described herein to the levels of oncogenes (e.g. ras) or tumor suppressor genes (e.g. FAP or p53). Thus expression of specific marker polynucleotides can be used to discriminate between normal and cancerous tissue, to discriminate between cancers with different cells of origin, to discriminate between cancers with different potential metastatic rates, etc. For a review of other markers of cancer, see, e.g., Hanahan et al. (2000) Cell 100:57-70.

[0178] Treatment of Cancer

[0179] The invention further provides methods for reducing growth of cancer cells. The methods provide for decreasing the expression of a gene that is differentially expressed in a cancer cell or decreasing the level of and/or decreasing an activity of a cancer-associated polypeptide. In general, the methods comprise contacting a cancer cell with a substance that modulates (1) expression of a gene that is differentially expressed in cancer; or (2) a level of and/or an activity of a cancer-associated polypeptide.

[0180] “Reducing growth of cancer cells” includes, but is not limited to, reducing proliferation of cancer cells, and reducing the incidence of a non-cancerous cell becoming a cancerous cell. Whether a reduction in cancer cell growth has been achieved can be readily determined using any known assay, including, but not limited to, [³H]-thymidine incorporation; counting cell number over a period of time; detecting and/or measuring a marker associated with breast cancer (e.g., PSA).

[0181] The present invention provides methods for treating cancer, generally comprising administering to an individual in need thereof a substance that reduces cancer cell growth, in an amount sufficient to reduce cancer cell growth and treat the cancer. Whether a substance, or a specific amount of the substance, is effective in treating cancer can be assessed using any of a variety of known diagnostic assays for cancer, including, but not limited to, proctoscopy, rectal examination, biopsy, contrast radiographic studies, CAT scan, and detection of a tumor marker associated with cancer in the blood of the individual (e.g., PSA (breast-specific antigen)). The substance can be administered systemically or locally. Thus, in some embodiments, the substance is administered locally, and cancer growth is decreased at the site of administration. Local administration may be useful in treating, e.g., a solid tumor.

[0182] A substance that reduces cancer cell growth can be targeted to a cancer cell. Thus, in some embodiments, the invention provides a method of delivering a drug to a cancer cell, comprising administering a drug-antibody complex to a subject, wherein the antibody is specific for a cancer-associated polypeptide, and the drug is one that reduces cancer cell growth, a variety of which are known in the art. Targeting can be accomplished by coupling (e.g., linking, directly or via a linker molecule, either covalently or non-covalently, so as to form a drug-antibody complex) a drug to an antibody specific for a cancer-associated polypeptide. Methods of coupling a drug to an antibody are well known in the art and need not be elaborated upon herein.

[0183] Tumor Classification and Patient Stratification

[0184] The invention further provides for methods of classifying tumors, and thus grouping or “stratifying” patients, according to the expression profile of selected differentially expressed genes in a tumor. Differentially expressed genes can be analyzed for correlation with other differentially expressed genes in a single tumor type or across tumor types. Genes that demonstrate consistent correlation in expression profile in a given cancer cell type (e.g., in a cancer cell or type of cancer) can be grouped together, e.g., when one gene is overexpressed in a tumor, a second gene is also usually overexpressed. Tumors can then be classified according to the expression profile of one or more genes selected from one or more groups.

[0185] The tumor of each patient in a pool of potential patients can be classified as described above. Patients having similarly classified tumors can then be selected for participation in an investigative or clinical trial of a cancer therapeutic where a homogeneous population is desired. The tumor classification of a patient can also be used in assessing the efficacy of a cancer therapeutic in a heterogeneous patient population. In addition, therapy for a patient having a tumor of a given expression profile can then be selected accordingly.

[0186] In another embodiment, differentially expressed gene products (e.g., polypeptides or polynucleotides encoding such polypeptides) may be effectively used in treatment through vaccination. The growth of cancer cells is naturally limited in part due to immune surveillance. Stimulation of the immune system using a particular tumor-specific antigen enhances the effect towards the tumor expressing the antigen. An active vaccine comprising a polypeptide encoded by the cDNA of this invention would be appropriately administered to subjects having an alteration, e.g., overabundance, of the corresponding RNA, or those predisposed for developing cancer cells with an alteration of the same RNA. Polypeptide antigens are typically combined with an adjuvant as part of a vaccine composition. The vaccine is preferably administered first as a priming dose, and then again as a boosting dose, usually at least four weeks later. Further boosting doses may be given to enhance the effect. The dose and its timing are usually determined by the person responsible for the treatment.

[0187] The invention also encompasses the selection of a therapeutic regimen based upon the expression profile of differentially expressed genes in the patient's tumor. For example, a tumor can be analyzed for its expression profile of the genes corresponding to SEQ ID NOS:1, 3, 5, 7, 9, 11-13, 15, 16, 18, 20, 22, 24, 26, 27, 29 and 128-1618 as described herein, e.g., the tumor is analyzed to determine which genes are expressed at elevated levels or at decreased levels relative to normal cells of the same tissue type. The expression patterns of the tumor are then compared to the expression patterns of tumors that respond to a selected therapy. Where the expression profiles of the test tumor cell and the expression profile of a tumor cell of known drug responsivity at least substantially match (e.g., selected sets of genes at elevated levels in the tumor of known drug responsivity and are also at elevated levels in the test tumor cell), then the therapeutic agent selected for therapy is the drug to which tumors with that expression pattern respond.

[0188] Pattern Matching in Diagnosis Using Arrays

[0189] In another embodiment, the diagnostic and/or prognostic methods of the invention involve detection of expression of a selected set of genes in a test sample to produce a test expression pattern (TEP). The TEP is compared to a reference expression pattern (REP), which is generated by detection of expression of the selected set of genes in a reference sample (e.g., a positive or negative control sample). The selected set of genes includes at least one of the genes of the invention, which genes correspond to the polynucleotide sequences described herein. Of particular interest is a selected set of genes that includes gene differentially expressed in the disease for which the test sample is to be screened.

Identification of Therapeutic Targets and Anti-Cancer Therapeutic Agents

[0190] The present invention also encompasses methods for identification of agents having the ability to modulate activity of a differentially expressed gene product, as well as methods for identifying a differentially expressed gene product as a therapeutic target for treatment of cancer.

[0191] Identification of compounds that modulate activity of a differentially expressed gene product can be accomplished using any of a variety of drug screening techniques. Such agents are candidates for development of cancer therapies. Of particular interest are screening assays for agents that have tolerable toxicity for normal, non-cancerous human cells. The screening assays of the invention are generally based upon the ability of the agent to modulate an activity of a differentially expressed gene product and/or to inhibit or suppress phenomenon associated with cancer (e.g., cell proliferation, colony formation, cell cycle arrest, metastasis, and the like).

[0192] Screening of Candidate Agents

[0193] Screening assays can be based upon any of a variety of techniques readily available and known to one of ordinary skill in the art. In general, the screening assays involve contacting a cancerous cell with a candidate agent, and assessing the effect upon biological activity of a differentially expressed gene product. The effect upon a biological activity can be detected by, for example, detection of expression of a gene product of a differentially expressed gene (e.g., a decrease in mRNA or polypeptide levels, would in turn cause a decrease in biological activity of the gene product). Alternatively or in addition, the effect of the candidate agent can be assessed by examining the effect of the candidate agent in a functional assay. For example, where the differentially expressed gene product is an enzyme, then the effect upon biological activity can be assessed by detecting a level of enzymatic activity associated with the differentially expressed gene product. The functional assay will be selected according to the differentially expressed gene product. In general, where the differentially expressed gene is increased in expression in a cancerous cell, agents of interest are those that decrease activity of the differentially expressed gene product.

[0194] Assays described infra can be readily adapted in the screening assay embodiments of the invention. Exemplary assays useful in screening candidate agents include, but are not limited to, hybridization-based assays (e.g., use of nucleic acid probes or primers to assess expression levels), antibody-based assays (e.g., to assess levels of polypeptide gene products), binding assays (e.g., to detect interaction of a candidate agent with a differentially expressed polypeptide, which assays may be competitive assays where a natural or synthetic ligand for the polypeptide is available), and the like. Additional exemplary assays include, but are not necessarily limited to, cell proliferation assays, antisense knockout assays, assays to detect inhibition of cell cycle, assays of induction of cell death/apoptosis, and the like. Generally such assays are conducted in vitro, but many assays can be adapted for in vivo analyses, e.g., in an animal model of the cancer.

[0195] Identification of Therapeutic Targets

[0196] In another embodiment, the invention contemplates identification of differentially expressed genes and gene products as therapeutic targets. In some respects, this is the converse of the assays described above for identification of agents having activity in modulating (e.g., decreasing or increasing) activity of a differentially expressed gene product.

[0197] In this embodiment, therapeutic targets are identified by examining the effect(s) of an agent that can be demonstrated or has been demonstrated to modulate a cancerous phenotype (e.g., inhibit or suppress or prevent development of a cancerous phenotype). Such agents are generally referred to herein as an “anti-cancer agent”, which agents encompass chemotherapeutic agents. For example, the agent can be an antisense oligonucleotide that is specific for a selected gene transcript. For example, the antisense oligonucleotide may have a sequence corresponding to a sequence of a differentially expressed gene described herein, e.g., a sequence of one of SEQ ID NOS:1, 3, 5, 7, 9, 11-13, 15, 16, 18, 20, 22, 24, 26, 27, 29 and 128-1618.

[0198] Assays for identification of therapeutic targets can be conducted in a variety of ways using methods that are well known to one of ordinary skill in the art. For example, a test cancerous cell that expresses or overexpresses a differentially expressed gene is contacted with an anti-cancer agent, the effect upon a cancerous phenotype and a biological activity of the candidate gene product assessed. The biological activity of the candidate gene product can be assayed be examining, for example, modulation of expression of a gene encoding the candidate gene product (e.g., as detected by, for example, an increase or decrease in transcript levels or polypeptide levels), or modulation of an enzymatic or other activity of the gene product. The cancerous phenotype can be, for example, cellular proliferation, loss of contact inhibition of growth (e.g., colony formation), tumor growth (in vitro or in vivo), and the like. Alternatively or in addition, the effect of modulation of a biological activity of the candidate target gene upon cell death/apoptosis or cell cycle regulation can be assessed.

[0199] Inhibition or suppression of a cancerous phenotype, or an increase in cell death or apoptosis as a result of modulation of biological activity of a candidate gene product indicates that the candidate gene product is a suitable target for cancer therapy. Assays described infra can be readily adapted for assays for identification of therapeutic targets. Generally such assays are conducted in vitro, but many assays can be adapted for in vivo analyses, e.g., in an appropriate, art-accepted animal model of the cancer.

[0200] Candidate Agents

[0201] The term “agent” as used herein describes any molecule, e.g. protein or pharmaceutical, with the capability of modulating a biological activity of a gene product of a differentially expressed gene. Generally a plurality of assay mixtures are run in parallel with different agent concentrations to obtain a differential response to the various concentrations. Typically, one of these concentrations serves as a negative control, i.e. at zero concentration or below the level of detection.

[0202] Candidate agents encompass numerous chemical classes, though typically they are organic molecules, preferably small organic compounds having a molecular weight of more than 50 and less than about 2,500 daltons. Candidate agents comprise functional groups necessary for structural interaction with proteins, particularly hydrogen bonding, and typically include at least an amine, carbonyl, hydroxyl or carboxyl group, preferably at least two of the functional chemical groups. The candidate agents often comprise cyclical carbon or heterocyclic structures and/or aromatic or polyaromatic structures substituted with one or more of the above functional groups. Candidate agents are also found among biomolecules including, but not limited to: peptides, saccharides, fatty acids, steroids, purines, pyrimidines, derivatives, structural analogs or combinations thereof.

[0203] Candidate agents are obtained from a wide variety of sources including libraries of synthetic or natural compounds. For example, numerous means are available for random and directed synthesis of a wide variety of organic compounds and biomolecules, including expression of randomized oligonucleotides and oligopeptides. Alternatively, libraries of natural compounds in the form of bacterial, fungal, plant and animal extracts (including extracts from human tissue to identify endogenous factors affecting differentially expressed gene products) are available or readily produced. Additionally, natural or synthetically produced libraries and compounds are readily modified through conventional chemical, physical and biochemical means, and may be used to produce combinatorial libraries. Known pharmacological agents may be subjected to directed or random chemical modifications, such as acylation, alkylation, esterification, amidification, etc. to produce structural analogs.

[0204] Exemplary candidate agents of particular interest include, but are not limited to, antisense and RNAi polynucleotides, and antibodies, soluble receptors, and the like. Antibodies and soluble receptors are of particular interest as candidate agents where the target differentially expressed gene product is secreted or accessible at the cell-surface (e.g., receptors and other molecule stably-associated with the outer cell membrane).

[0205] For method that involve RNAi (RNA interference), a double stranded RNA (dsRNA) molecule is usually used. The dsRNA is prepared to be substantially identical to at least a segment of a subject polynucleotide (e.g. a cDNA or gene). In general, the dsRNA is selected to have at least 70%, 75%, 80%, 85% or 90% sequence identity with the subject polynucleotide over at least a segment of the candidate gene. In other instances, the sequence identity is even higher, such as 95%, 97% or 99%, and in still other instances, there is 100% sequence identity with the subject polynucleotide over at least a segment of the subject polynucleotide. The size of the segment over which there is sequence identity can vary depending upon the size of the subject polynucleotide. In general, however, there is substantial sequence identity over at least 15, 20, 25, 30, 35, 40 or 50 nucleotides. In other instances, there is substantial sequence identity over at least 100, 200, 300, 400, 500 or 1000 nucleotides; in still other instances, there is substantial sequence identity over the entire length of the subject polynucleotide, i.e., the coding and non-coding region of the candidate gene.

[0206] Because only substantial sequence similarity between the subject polynucleotide and the dsRNA is necessary, sequence variations between these two species arising from genetic mutations, evolutionary divergence and polymorphisms can be tolerated. Moreover, as described further infra, the dsRNA can include various modified or nucleotide analogs.

[0207] Usually the dsRNA consists of two separate complementary RNA strands. However, in some instances, the dsRNA may be formed by a single strand of RNA that is self-complementary, such that the strand loops back upon itself to form a hairpin loop. Regardless of form, RNA duplex formation can occur inside or outside of a cell.

[0208] The size of the dsRNA that is utilized varies according to the size of the subject polynucleotide whose expression is to be suppressed and is sufficiently long to be effective in reducing expression of the subject polynucleotide in a cell. Generally, the dsRNA is at least 10-15 nucleotides long. In certain applications, the dsRNA is less than 20, 21, 22, 23, 24 or 25 nucleotides in length. In other instances, the dsRNA is at least 50, 100, 150 or 200 nucleotides in length. The dsRNA can be longer still in certain other applications, such as at least 300, 400, 500 or 600 nucleotides. Typically, the dsRNA is not longer than 3000 nucleotides. The optimal size for any particular subject polynucleotide can be determined by one of ordinary skill in the art without undue experimentation by varying the size of the dsRNA in a systematic fashion and determining whether the size selected is effective in interfering with expression of the subject polynucleotide.

[0209] dsRNA can be prepared according to any of a number of methods that are known in the art, including in vitro and in vivo methods, as well as by synthetic chemistry approaches.

[0210] In vitro methods. Certain methods generally involve inserting the segment corresponding to the candidate gene that is to be transcribed between a promoter or pair of promoters that are oriented to drive transcription of the inserted segment and then utilizing an appropriate RNA polymerase to carry out transcription. One such arrangement involves positioning a DNA fragment corresponding to the candidate gene or segment thereof into a vector such that it is flanked by two opposable polymerase-specific promoters that can be same or different. Transcription from such promoters produces two complementary RNA strands that can subsequently anneal to form the desired dsRNA. Exemplary plasmids for use in such systems include the plasmid (PCR 4.0 TOPO) (available from Invitrogen). Another example is the vector pGEM-T (Promega, Madison, Wis.) in which the oppositely oriented promoters are T7 and SP6; the T3 promoter can also be utilized.

[0211] In a second arrangement, DNA fragments corresponding to the segment of the subject polynucleotide that is to be transcribed is inserted both in the sense and antisense orientation downstream of a single promoter. In this system, the sense and antisense fragments are cotranscribed to generate a single RNA strand that is self-complementary and thus can form dsRNA.

[0212] Various other in vitro methods have been described. Examples of such methods include, but are not limited to, the methods described by Sadher et al. (Biochem. Int. 14:1015, 1987); by Bhattacharyya (Nature 343:484, 1990); and by Livache, et al. (U.S. Pat. No. 5,795,715), each of which is incorporated herein by reference in its entirety.

[0213] Single-stranded RNA can also be produced using a combination of enzymatic and organic synthesis or by total organic synthesis. The use of synthetic chemical methods enable one to introduce desired modified nucleotides or nucleotide analogs into the dsRNA.

[0214] In vivo methods. dsRNA can also be prepared in vivo according to a number of established methods (see, e.g., Sambrook, et al. (1989) Molecular Cloning: A Laboratory Manual, 2^{nd} ed.; Transcription and Translation (B. D. Hames, and S. J. Higgins, Eds., 1984); DNA Cloning, volumes I and II (D. N. Glover, Ed., 1985); and Oligonucleotide Synthesis (M. J. Gait, Ed., 1984, each of which is incorporated herein by reference in its entirety).

[0215] Once the single-stranded RNA has been formed, the complementary strands are allowed to anneal to form duplex RNA. Transcripts are typically treated with DNAase and further purified according to established protocols to remove proteins. Usually such purification methods are not conducted with phenol:chloroform. The resulting purified transcripts are subsequently dissolved in RNAase free water or a buffer of suitable composition.

[0216] dsRNA is generated by annealing the sense and anti-sense RNA in vitro. Generally, the strands are initially denatured to keep the strands separate and to avoid self-annealing. During the annealing process, typically certain ratios of the sense and antisense strands are combined to facilitate the annealing process. In some instances, a molar ratio of sense to antisense strands of 3:7 is used; in other instances, a ratio of 4:6 is utilized; and in still other instances, the ratio is 1:1.

[0217] The buffer composition utilized during the annealing process can in some instances affect the efficacy of the annealing process and subsequent transfection procedure. While some have indicated that the buffered solution used to carry out the annealing process should include a potassium salt such as potassium chloride (e.g. at a concentration of about 80 mM). In some embodiments, the buffer is substantially postassium free. Once single-stranded RNA has annealed to form duplex RNA, typically any single-strand overhangs are removed using an enzyme that specifically cleaves such overhangs (e.g., RNAase A or RNAase T).

[0218] Once the dsRNA has been formed, it is introduced into a reference cell, which can include an individual cell or a population of cells (e.g., a tissue, an embryo and an entire organism). The cell can be from essentially any source, including animal, plant, viral, bacterial, fungal and other sources. If a tissue, the tissue can include dividing or nondividing and differentiated or undifferentiated cells. Further, the tissue can include germ line cells and somatic cells. Examples of differentiated cells that can be utilized include, but are not limited to, neurons, glial cells, blood cells, megakaryocytes, lymphocytes, macrophages, neutrophils, eosinophils, basophils, mast cells, leukocytes, granulocytes, keratinocytes, adipocytes, osteoblasts, osteoclasts, hepatocytes, cells of the endocrine or exocrine glands, fibroblasts, myocytes, cardiomyocytes, and endothelial cells. The cell can be an individual cell of an embryo, and can be a blastocyte or an oocyte.

[0219] Certain methods are conducted using model systems for particular cellular states (e.g., a disease). For instance, certain methods provided herein are conducted with a cancer cell lines that serves as a model system for investigating genes that are correlated with various cancers.

[0220] A number of options can be utilized to deliver the dsRNA into a cell or population of cells such as in a cell culture, tissue or embryo. For instance, RNA can be directly introduced intracellularly. Various physical methods are generally utilized in such instances, such as administration by microinjection (see, e.g., Zernicka-Goetz, et al. (1997) Development 124:1133-1137; and Wianny, et al. (1998) Chromosoma 107: 430-439).

[0221] Other options for cellular delivery include permeabilizing the cell membrane and electroporation in the presence of the dsRNA, liposome-mediated transfection, or transfection using chemicals such as calcium phosphate. A number of established gene therapy techniques can also be utilized to introduce the dsRNA into a cell. By introducing a viral construct within a viral particle, for instance, one can achieve efficient introduction of an expression construct into the cell and transcription of the RNA encoded by the construct.

[0222] If the dsRNA is to be introduced into an organism or tissue, gene gun technology is an option that can be employed. This generally involves immobilizing the dsRNA on a gold particle which is subsequently fired into the desired tissue. Research has also shown that mammalian cells have transport mechanisms for taking in dsRNA (see, e.g., Asher, et al. (1969) Nature 223:715-717). Consequently, another delivery option is to administer the dsRNA extracellularly into a body cavity, interstitial space or into the blood system of the mammal for subsequent uptake by such transport processes. The blood and lymph systems and the cerebrospinal fluid are potential sites for injecting dsRNA. Oral, topical, parenteral, rectal and intraperitoneal administration are also possible modes of administration.

[0223] The composition introduced can also include various other agents in addition to the dsRNA. Examples of such agents include, but are not limited to, those that stabilize the dsRNA, enhance cellular uptake and/or increase the extent of interference. Typically, the dsRNA is introduced in a buffer that is compatible with the composition of the cell into which the RNA is introduced to prevent the cell from being shocked. The minimum size of the dsRNA that effectively achieves gene silencing can also influence the choice of delivery system and solution composition.

[0224] Sufficient dsRNA is introduced into the tissue to cause a detectable change in expression of a taget gene (assuming the candidate gene is in fact being expressed in the cell into which the dsRNA is introduced) using available detection methodologies. Thus, in some instances, sufficient dsRNA is introduced to achieve at least a 5-10% reduction in candidate gene expression as compared to a cell in which the dsRNA is not introduced. In other instances, inhibition is at least 20, 30, 40 or 50%. In still other instances, the inhibition is at least 60, 70, 80, 90 or 95%. Expression in some instances is essentially completely inhibited to undetectable levels.

[0225] The amount of dsRNA introduced depends upon various factors such as the mode of administration utilized, the size of the dsRNA, the number of cells into which dsRNA is administered, and the age and size of an animal if dsRNA is introduced into an animal. An appropriate amount can be determined by those of ordinary skill in the art by initially administering dsRNA at several different concentrations for example, for example. In certain instances when dsRNA is introduced into a cell culture, the amount of dsRNA introduced into the cells varies from about 0.5 to 3 μg per 10⁶ cells.

[0226] A number of options are available to detect interference of candidate gene expression (i.e., to detect candidate gene silencing). In general, inhibition in expression is detected by detecting a decrease in the level of the protein encoded by the candidate gene, determining the level of mRNA transcribed from the gene and/or detecting a change in phenotype associated with candidate gene expression.

[0227] Use of Polypeptides to Screen for Peptide Analogs and Antagonists

[0228] Polypeptides encoded by differentially expressed genes identified herein can be used to screen peptide libraries to identify binding partners, such as receptors, from among the encoded polypeptides. Peptide libraries can be synthesized according to methods known in the art (see, e.g., U.S. Pat. No. 5,010,175 and WO 91/17823).

[0229] Agonists or antagonists of the polypeptides of the invention can be screened using any available method known in the art, such as signal transduction, antibody binding, receptor binding, mitogenic assays, chemotaxis assays, etc. The assay conditions ideally should resemble the conditions under which the native activity is exhibited in vivo, that is, under physiologic pH, temperature, and ionic strength. Suitable agonists or antagonists will exhibit strong inhibition or enhancement of the native activity at concentrations that do not cause toxic side effects in the subject. Agonists or antagonists that compete for binding to the native polypeptide can require concentrations equal to or greater than the native concentration, while inhibitors capable of binding irreversibly to the polypeptide can be added in concentrations on the order of the native concentration.

[0230] Such screening and experimentation can lead to identification of a polypeptide binding partner, such as a receptor, encoded by a gene or a cDNA corresponding to a polynucleotide described herein, and at least one peptide agonist or antagonist of the binding partner. Such agonists and antagonists can be used to modulate, enhance, or inhibit receptor function in cells to which the receptor is native, or in cells that possess the receptor as a result of genetic engineering. Further, if the receptor shares biologically important characteristics with a known receptor, information about agonist/antagonist binding can facilitate development of improved agonists/antagonists of the known receptor.

[0231] Vaccines and Uses

[0232] The differentially expressed nucleic acids and polypeptides produced by the nucleic acids of the invention can also be used to modulate primary immune response to prevent or treat cancer. Every immune response is a complex and intricately regulated sequence of events involving several cell types. It is triggered when an antigen enters the body and encounters a specialized class of cells called antigen-presenting cells (APCs). These APCs capture a minute amount of the antigen and display it in a form that can be recognized by antigen-specific helper T lymphocytes. The helper (Th) cells become activated and, in turn, promote the activation of other classes of lymphocytes, such as B cells or cytotoxic T cells. The activated lymphocytes then proliferate and carry out their specific effector functions, which in many cases successfully activate or eliminate the antigen. Thus, activating the immune response to a particular antigen associated with a cancer cell can protect the patient from developing cancer or result in lymphocytes eliminating cancer cells expressing the antigen.

[0233] Gene products, including polypeptides, mRNA (particularly mRNAs having distinct secondary and/or tertiary structures), cDNA, or complete gene, can be prepared and used in vaccines for the treatment or prevention of hyperproliferative disorders and cancers. The nucleic acids and polypeptides can be utilized to enhance the immune response, prevent tumor progression, prevent hyperproliferative cell growth, and the like. Methods for selecting nucleic acids and polypeptides that are capable of enhancing the immune response are known in the art. Preferably, the gene products for use in a vaccine are gene products which are present on the surface of a cell and are recognizable by lymphocytes and antibodies.

[0234] The gene products may be formulated with pharmaceutically acceptable carriers into pharmaceutical compositions by methods known in the art. The composition is useful as a vaccine to prevent or treat cancer. The composition may further comprise at least one co-immunostimulatory molecule, including but not limited to one or more major histocompatibility complex (MHC) molecules, such as a class I or class II molecule, preferably a class I molecule. The composition may further comprise other stimulator molecules including B7.1, B7.2, ICAM-1, ICAM-2, LFA-1, LFA-3, CD72 and the like, immunostimulatory polynucleotides (which comprise an 5′-CG-3′ wherein the cytosine is unmethylated), and cytokines which include but are not limited to IL-1 through IL-15, TNF-α, IFN-γ, RANTES, G-CSF, M-CSF, IFN-α, CTAP III, ENA-78, GRO, I-309, PF-4, IP-10, LD-78, MGSA, MIP-1α, MIP-1β, or combination thereof, and the like for immunopotentiation. In one embodiment, the immunopotentiators of particular interest are those that facilitate a Th1 immune response.

[0235] The gene products may also be prepared with a carrier that will protect the gene products against rapid elimination from the body, such as a controlled release formulation, including implants and microencapsulated delivery systems. Biodegradable polymers can be used, such as ethylene vinyl acetate, polyanhydrides, polyglycolic acid, collagen, polyorthoesters, polylactic acid, and the like. Methods for preparation of such formulations are known in the art.

[0236] In the methods of preventing or treating cancer, the gene products may be administered via one of several routes including but not limited to transdermal, transmucosal, intravenous, intramuscular, subcutaneous, intradermal, intraperitoneal, intrathecal, intrapleural, intrauterine, rectal, vaginal, topical, intratumor, and the like. For transmucosal or transdermal administration, penetrants appropriate to the barrier to be permeated are used in the formulation. Such penetrants are generally known in the art, and include, for example, administration bile salts and fusidic acid derivatives. In addition, detergents may be used to facilitate permeation. Transmucosal administration may be by nasal sprays or suppositories. For oral administration, the gene products are formulated into conventional oral administration form such as capsules, tablets, elixirs and the like.

[0237] The gene product is administered to a patient in an amount effective to prevent or treat cancer. In general, it is desirable to provide the patient with a dosage of gene product of at least about 1 pg per Kg body weight, preferably at least about 1 ng per Kg body weight, more preferably at least about 1 μg or greater per Kg body weight of the recipient. A range of from about 1 ng per Kg body weight to about 100 mg per Kg body weight is preferred although a lower or higher dose may be administered. The dose is effective to prime, stimulate and/or cause the clonal expansion of antigen-specific T lymphocytes, preferably cytotoxic T lymphocytes, which in turn are capable of preventing or treating cancer in the recipient. The dose is administered at least once and may be provided as a bolus or a continuous administration. Multiple administrations of the dose over a period of several weeks to months may be preferable. Subsequent doses may be administered as indicated.

[0238] In another method of treatment, autologous cytotoxic lymphocytes or tumor infiltrating lymphocytes may be obtained from a patient with cancer. The lymphocytes are grown in culture, and antigen-specific lymphocytes are expanded by culturing in the presence of the specific gene products alone or in combination with at least one co-immunostimulatory molecule with cytokines. The antigen-specific lymphocytes are then infused back into the patient in an amount effective to reduce or eliminate the tumors in the patient. Cancer vaccines and their uses are further described in U.S. Pat. No. 5,961,978; U.S. Pat. No. 5,993,829; U.S. Pat. No. 6,132,980; and WO 00/38706.

[0239] Pharmaceutical Compositions and Uses

[0240] Pharmaceutical compositions can comprise polypeptides, receptors that specifically bind a polypeptide produced by a differentially expressed gene (e.g., antibodies, or polynucleotides (including antisense nucleotides and ribozymes) of the claimed invention in a therapeutically effective amount. The compositions can be used to treat primary tumors as well as metastases of primary tumors. In addition, the pharmaceutical compositions can be used in conjunction with conventional methods of cancer treatment, e.g., to sensitize tumors to radiation or conventional chemotherapy.

[0241] Where the pharmaceutical composition comprises a receptor (such as an antibody) that specifically binds to a gene product encoded by a differentially expressed gene, the receptor can be coupled to a drug for delivery to a treatment site or coupled to a detectable label to facilitate imaging of a site comprising cancer cells. Methods for coupling antibodies to drugs and detectable labels are well known in the art, as are methods for imaging using detectable labels.

[0242] The term “therapeutically effective amount” as used herein refers to an amount of a therapeutic agent to treat, ameliorate, or prevent a desired disease or condition, or to exhibit a detectable therapeutic or preventative effect. The effect can be detected by, for example, chemical markers or antigen levels. Therapeutic effects also include reduction in physical symptoms, such as decreased body temperature.

[0243] The precise effective amount for a subject will depend upon the subject's size and health, the nature and extent of the condition, and the therapeutics or combination of therapeutics selected for administration. Thus, it is not useful to specify an exact effective amount in advance. However, the effective amount for a given situation is determined by routine experimentation and is within the judgment of the clinician. For purposes of the present invention, an effective dose will generally be from about 0.01 mg/kg to 50 mg/kg or 0.05 mg/kg to about 10 mg/kg of the DNA constructs in the individual to which it is administered.

[0244] A pharmaceutical composition can also contain a pharmaceutically acceptable carrier. The term “pharmaceutically acceptable carrier” refers to a carrier for administration of a therapeutic agent, such as antibodies or a polypeptide, genes, and other therapeutic agents. The term refers to any pharmaceutical carrier that does not itself induce the production of antibodies harmful to the individual receiving the composition, and which can be administered without undue toxicity. Suitable carriers can be large, slowly metabolized macromolecules such as proteins, polysaccharides, polylactic acids, polyglycolic acids, polymeric amino acids, amino acid copolymers, lipid aggregates and inactive virus particles. Such carriers are well known to those of ordinary skill in the art. Pharmaceutically acceptable carriers in therapeutic compositions can include liquids such as water, saline, glycerol and ethanol. Auxiliary substances, such as wetting or emulsifying agents, pH buffering substances, and the like, can also be present in such vehicles.

[0245] Typically, the therapeutic compositions are prepared as injectables, either as liquid solutions or suspensions; solid forms suitable for solution in, or suspension in, liquid vehicles prior to injection can also be prepared. Liposomes are included within the definition of a pharmaceutically acceptable carrier. Pharmaceutically acceptable salts can also be present in the pharmaceutical composition, e.g., mineral acid salts such as hydrochlorides, hydrobromides, phosphates, sulfates, and the like; and the salts of organic acids such as acetates, propionates, malonates, benzoates, and the like. A thorough discussion of pharmaceutically acceptable excipients is available in Remington: The Science and Practice of Pharmacy (1995) Alfonso Gennaro, Lippincott, Williams, & Wilkins.

[0246] Delivery Methods

[0247] Once formulated, the compositions contemplated by the invention can be (1) administered directly to the subject (e.g., as polynucleotide, polypeptides, small molecule agonists or antagonists, and the like); or (2) delivered ex vivo, to cells derived from the subject (e.g., as in ex vivo gene therapy). Direct delivery of the compositions will generally be accomplished by parenteral injection, e.g., subcutaneously, intraperitoneally, intravenously or intramuscularly, intratumoral or to the interstitial space of a tissue. Other modes of administration include oral and pulmonary administration, suppositories, and transdermal applications, needles, and gene guns or hyposprays. Dosage treatment can be a single dose schedule or a multiple dose schedule.

[0248] Methods for the ex vivo delivery and reimplantation of transformed cells into a subject are known in the art and described in e.g., International Publication No. WO 93/14778. Examples of cells useful in ex vivo applications include, for example, stem cells, particularly hematopoetic, lymph cells, macrophages, dendritic cells, or tumor cells. Generally, delivery of nucleic acids for both ex vivo and in vitro applications can be accomplished by, for example, dextran-mediated transfection, calcium phosphate precipitation, polybrene mediated transfection, protoplast fusion, electroporation, encapsulation of the polynucleotide(s) in liposomes, and direct microinjection of the DNA into nuclei, all well known in the art.

[0249] Once differential expression of a gene corresponding to a polynucleotide described herein has been found to correlate with a proliferative disorder, such as neoplasia, dysplasia, and hyperplasia, the disorder can be amenable to treatment by administration of a therapeutic agent based on the provided polynucleotide, corresponding polypeptide or other corresponding molecule (e.g., antisense, ribozyme, etc.). In other embodiments, the disorder can be amenable to treatment by administration of a small molecule drug that, for example, serves as an inhibitor (antagonist) of the function of the encoded gene product of a gene having increased expression in cancerous cells relative to normal cells or as an agonist for gene products that are decreased in expression in cancerous cells (e.g., to promote the activity of gene products that act as tumor suppressors).

[0250] The dose and the means of administration of the inventive pharmaceutical compositions are determined based on the specific qualities of the therapeutic composition, the condition, age, and weight of the patient, the progression of the disease, and other relevant factors. For example, administration of polynucleotide therapeutic composition agents includes local or systemic administration, including injection, oral administration, particle gun or catheterized administration, and topical administration. In general, the therapeutic polynucleotide composition contains an expression construct comprising a promoter operably linked to a polynucleotide of at least 12, 22, 25, 30, or 35 contiguous nt of the polynucleotide disclosed herein. Various methods can be used to administer the therapeutic composition directly to a specific site in the body. For example, a small metastatic lesion is located and the therapeutic composition injected several times in several different locations within the body of the tumor. Alternatively, arteries which serve a tumor are identified, and the therapeutic composition injected into such an artery, in order to deliver the composition directly into the tumor. A tumor that has a necrotic center is aspirated and the composition injected directly into the now empty center of the tumor. The antisense composition is directly administered to the surface of the tumor, for example, by topical application of the composition. X-ray imaging is used to assist in certain of the above delivery methods.

[0251] Targeted delivery of therapeutic compositions containing an antisense polynucleotide, subgenomic polynucleotides, or antibodies to specific tissues can also be used. Receptor-mediated DNA delivery techniques are described in, for example, Findeis et al., Trends Biotechnol. (1993) 11:202; Chiou et al., Gene Therapeutics: Methods And Applications Of Direct Gene Transfer (J. A. Wolff, ed.) (1994); Wu et al., J. Biol. Chem. (1988) 263:621; Wu et al., J. Biol. Chem. (1994) 269:542; Zenke et al., Proc. Natl. Acad. Sci. (USA) (1990) 87:3655; Wu et al., J. Biol. Chem. (1991) 266:338. Therapeutic compositions containing a polynucleotide are administered in a range of about 100 ng to about 200 mg of DNA for local administration in a gene therapy protocol. Concentration ranges of about 500 ng to about 50 mg, about 1 μg to about 2 mg, about 5 μg to about 500 μg, and about 20 μg to about 100 μg of DNA can also be used during a gene therapy protocol. Factors such as method of action (e.g., for enhancing or inhibiting levels of the encoded gene product) and efficacy of transformation and expression are considerations that will affect the dosage required for ultimate efficacy of the antisense subgenomic polynucleotides.

[0252] The therapeutic polynucleotides and polypeptides of the present invention can be delivered using gene delivery vehicles. The gene delivery vehicle can be of viral or non-viral origin (see generally, Jolly, Cancer Gene Therapy (1994) 1:51; Kimura, Human Gene Therapy (1994) 5:845; Connelly, Human Gene Therapy (1995) 1:185; and Kaplitt, Nature Genetics (1994) 6:148). Expression of such coding sequences can be induced using endogenous mammalian or heterologous promoters. Expression of the coding sequence can be either constitutive or regulated.

[0253] Viral-based vectors for delivery of a desired polynucleotide and expression in a desired cell are well known in the art. Exemplary viral-based vehicles include, but are not limited to, recombinant retroviruses (see, e.g., WO 90/07936; WO 94/03622; WO 93/25698; WO 93/25234; U.S. Pat. No. 5,219,740; WO 93/11230; WO 93/10218; U.S. Pat. No. 4,777,127; GB Patent No. 2,200,651; EP 0 345 242; and WO 91/02805), alphavirus-based vectors (e.g., Sindbis virus vectors, Semliki forest virus (ATCC VR-67; ATCC VR-1247), Ross River virus (ATCC VR-373; ATCC VR-1246) and Venezuelan equine encephalitis virus (ATCC VR-923; ATCC VR-1250; ATCC VR 1249; ATCC VR-532), and adeno-associated virus (AAV) vectors (see, e.g., WO 94/12649, WO 93/03769; WO 93/19191; WO 94/28938; WO 95/11984 and WO 95/00655). Administration of DNA linked to killed adenovirus as described in Curiel, Hum. Gene Ther. (1992) 3:147 can also be employed.

[0254] Non-viral delivery vehicles and methods can also be employed, including, but not limited to, polycationic condensed DNA linked or unlinked to killed adenovirus alone (see, e.g., Curiel, Hum. Gene Ther. (1992) 3:147); ligand-linked DNA (see, e.g., Wu, J. Biol. Chem. (1989) 264:16985); eukaryotic cell delivery vehicles cells (see, e.g., U.S. Pat. No. 5,814,482; WO 95/07994; WO 96/17072; WO 95/30763; and WO 97/42338) and nucleic charge neutralization or fusion with cell membranes. Naked DNA can also be employed. Exemplary naked DNA introduction methods are described in WO 90/11092 and U.S. Pat. No. 5,580,859. Liposomes that can act as gene delivery vehicles are described in U.S. Pat. No. 5,422,120; WO 95/13796; WO 94/23697; WO 91/14445; and EP 0524968. Additional approaches are described in Philip, Mol. Cell Biol. (1994) 14:2411, and in Woffendin, Proc. Natl. Acad. Sci. (1994) 91:1581.

[0255] The sequences disclosed in this patent application were disclosed in several earlier patent applications. The relationship between the SEQ ID NOS in those earlier application and the SEQ ID NOS disclosed herein is shown in Tables 26 and 27.

TABLE 26
relationship between SEQ ID NOs. this patent application
and SEQ ID NOs of parent patent applications

| | | | | corresponding |
|---|---|---|---|---|
| | parent | | | SEQ IDs in |
| parent | application | | SEQ IDs in | this patent |
| case | no. | filing date | parent case | application |
| 1663 | 09/883,152 | Jun. 15, 2001 | 1-127 | 1-127 |
| 1552CON | 10/165,835 | Jun. 6, 2002 | 1-6 | 128-133 |
| 18178WO | US03/15465 | May 16, 2003 | 1-1548 | 134-1681 |

[0256] The disclosures of all prior U.S. applications to which the present application claims priority, which includes those U.S. applications referenced in the table above as well as their respective priority applications, are each incorporated herein by referenced in their entireties for all purposes, including the disclosures found in the Sequence Listings, tables, figures and Examples.

TABLE 27
Lookup table showing corresponding SEQ ID NOS in this
application and parent applications

| | | | corresponding |
|---|---|---|---|
| | parent | parent | SEQ ID NO in |
| SEQ ID NO in | application | application | parent |
| this application | docket no | serial no | application |
| 1 | 2300-1663 | 09/883,152 | 1 |
| 2 | 2300-1663 | 09/883,152 | 2 |
| 3 | 2300-1663 | 09/883,152 | 3 |
| 4 | 2300-1663 | 09/883,152 | 4 |
| 5 | 2300-1663 | 09/883,152 | 5 |
| 6 | 2300-1663 | 09/883,152 | 6 |
| 7 | 2300-1663 | 09/883,152 | 7 |
| 8 | 2300-1663 | 09/883,152 | 8 |
| 9 | 2300-1663 | 09/883,152 | 9 |
| 10 | 2300-1663 | 09/883,152 | 10 |
| 11 | 2300-1663 | 09/883,152 | 11 |
| 12 | 2300-1663 | 09/883,152 | 12 |
| 13 | 2300-1663 | 09/883,152 | 13 |
| 14 | 2300-1663 | 09/883,152 | 14 |
| 15 | 2300-1663 | 09/883,152 | 15 |
| 16 | 2300-1663 | 09/883,152 | 16 |
| 17 | 2300-1663 | 09/883,152 | 17 |
| 18 | 2300-1663 | 09/883,152 | 18 |
| 19 | 2300-1663 | 09/883,152 | 19 |
| 20 | 2300-1663 | 09/883,152 | 20 |
| 21 | 2300-1663 | 09/883,152 | 21 |
| 22 | 2300-1663 | 09/883,152 | 22 |
| 23 | 2300-1663 | 09/883,152 | 23 |
| 24 | 2300-1663 | 09/883,152 | 24 |
| 25 | 2300-1663 | 09/883,152 | 25 |
| 26 | 2300-1663 | 09/883,152 | 26 |
| 27 | 2300-1663 | 09/883,152 | 27 |
| 28 | 2300-1663 | 09/883,152 | 28 |
| 29 | 2300-1663 | 09/883,152 | 29 |
| 30 | 2300-1663 | 09/883,152 | 30 |
| 31 | 2300-1663 | 09/883,152 | 31 |
| 32 | 2300-1663 | 09/883,152 | 32 |
| 33 | 2300-1663 | 09/883,152 | 33 |
| 34 | 2300-1663 | 09/883,152 | 34 |
| 35 | 2300-1663 | 09/883,152 | 35 |
| 36 | 2300-1663 | 09/883,152 | 36 |
| 37 | 2300-1663 | 09/883,152 | 37 |
| 38 | 2300-1663 | 09/883,152 | 38 |
| 39 | 2300-1663 | 09/883,152 | 39 |
| 40 | 2300-1663 | 09/883,152 | 40 |
| 41 | 2300-1663 | 09/883,152 | 41 |
| 42 | 2300-1663 | 09/883,152 | 42 |
| 43 | 2300-1663 | 09/883,152 | 43 |
| 44 | 2300-1663 | 09/883,152 | 44 |
| 45 | 2300-1663 | 09/883,152 | 45 |
| 46 | 2300-1663 | 09/883,152 | 46 |
| 47 | 2300-1663 | 09/883,152 | 47 |
| 48 | 2300-1663 | 09/883,152 | 48 |
| 49 | 2300-1663 | 09/883,152 | 49 |
| 50 | 2300-1663 | 09/883,152 | 50 |
| 51 | 2300-1663 | 09/883,152 | 51 |
| 52 | 2300-1663 | 09/883,152 | 52 |
| 53 | 2300-1663 | 09/883,152 | 53 |
| 54 | 2300-1663 | 09/883,152 | 54 |
| 55 | 2300-1663 | 09/883,152 | 55 |
| 56 | 2300-1663 | 09/883,152 | 56 |
| 57 | 2300-1663 | 09/883,152 | 57 |
| 58 | 2300-1663 | 09/883,152 | 58 |
| 59 | 2300-1663 | 09/883,152 | 59 |
| 60 | 2300-1663 | 09/883,152 | 60 |
| 61 | 2300-1663 | 09/883,152 | 61 |
| 62 | 2300-1663 | 09/883,152 | 62 |
| 63 | 2300-1663 | 09/883,152 | 63 |
| 64 | 2300-1663 | 09/883,152 | 64 |
| 65 | 2300-1663 | 09/883,152 | 65 |
| 66 | 2300-1663 | 09/883,152 | 66 |
| 67 | 2300-1663 | 09/883,152 | 67 |
| 68 | 2300-1663 | 09/883,152 | 68 |
| 69 | 2300-1663 | 09/883,152 | 69 |
| 70 | 2300-1663 | 09/883,152 | 70 |
| 71 | 2300-1663 | 09/883,152 | 71 |
| 72 | 2300-1663 | 09/883,152 | 72 |
| 73 | 2300-1663 | 09/883,152 | 73 |
| 74 | 2300-1663 | 09/883,152 | 74 |
| 75 | 2300-1663 | 09/883,152 | 75 |
| 76 | 2300-1663 | 09/883,152 | 76 |
| 77 | 2300-1663 | 09/883,152 | 77 |
| 78 | 2300-1663 | 09/883,152 | 78 |
| 79 | 2300-1663 | 09/883,152 | 79 |
| 80 | 2300-1663 | 09/883,152 | 80 |
| 81 | 2300-1663 | 09/883,152 | 81 |
| 82 | 2300-1663 | 09/883,152 | 82 |
| 83 | 2300-1663 | 09/883,152 | 83 |
| 84 | 2300-1663 | 09/883,152 | 84 |
| 85 | 2300-1663 | 09/883,152 | 85 |
| 86 | 2300-1663 | 09/883,152 | 86 |
| 87 | 2300-1663 | 09/883,152 | 87 |
| 88 | 2300-1663 | 09/883,152 | 88 |
| 89 | 2300-1663 | 09/883,152 | 89 |
| 90 | 2300-1663 | 09/883,152 | 90 |
| 91 | 2300-1663 | 09/883,152 | 91 |
| 92 | 2300-1663 | 09/883,152 | 92 |
| 93 | 2300-1663 | 09/883,152 | 93 |
| 94 | 2300-1663 | 09/883,152 | 94 |
| 95 | 2300-1663 | 09/883,152 | 95 |
| 96 | 2300-1663 | 09/883,152 | 96 |
| 97 | 2300-1663 | 09/883,152 | 97 |
| 98 | 2300-1663 | 09/883,152 | 98 |
| 99 | 2300-1663 | 09/883,152 | 99 |
| 100 | 2300-1663 | 09/883,152 | 100 |
| 101 | 2300-1663 | 09/883,152 | 101 |
| 102 | 2300-1663 | 09/883,152 | 102 |
| 103 | 2300-1663 | 09/883,152 | 103 |
| 104 | 2300-1663 | 09/883,152 | 104 |
| 105 | 2300-1663 | 09/883,152 | 105 |
| 106 | 2300-1663 | 09/883,152 | 106 |
| 107 | 2300-1663 | 09/883,152 | 107 |
| 108 | 2300-1663 | 09/883,152 | 108 |
| 109 | 2300-1663 | 09/883,152 | 109 |
| 110 | 2300-1663 | 09/883,152 | 110 |
| 111 | 2300-1663 | 09/883,152 | 111 |
| 112 | 2300-1663 | 09/883,152 | 112 |
| 113 | 2300-1663 | 09/883,152 | 113 |
| 114 | 2300-1663 | 09/883,152 | 114 |
| 115 | 2300-1663 | 09/883,152 | 115 |
| 116 | 2300-1663 | 09/883,152 | 116 |
| 117 | 2300-1663 | 09/883,152 | 117 |
| 118 | 2300-1663 | 09/883,152 | 118 |
| 119 | 2300-1663 | 09/883,152 | 119 |
| 120 | 2300-1663 | 09/883,152 | 120 |
| 121 | 2300-1663 | 09/883,152 | 121 |
| 122 | 2300-1663 | 09/883,152 | 122 |
| 123 | 2300-1663 | 09/883,152 | 123 |
| 124 | 2300-1663 | 09/883,152 | 124 |
| 125 | 2300-1663 | 09/883,152 | 125 |
| 126 | 2300-1663 | 09/883,152 | 126 |
| 127 | 2300-1663 | 09/883,152 | 127 |
| 128 | 2300-1552CON | 10/165,835 | 1 |
| 129 | 2300-1552CON | 10/165,835 | 2 |
| 130 | 2300-1552CON | 10/165,835 | 3 |
| 131 | 2300-1552CON | 10/165,835 | 4 |
| 132 | 2300-1552CON | 10/165,835 | 5 |
| 133 | 2300-1552CON | 10/165,835 | 6 |
| 134 | 2300-18178WO | US03/15465 | 1 |
| 135 | 2300-18178WO | US03/15465 | 2 |
| 136 | 2300-18178WO | US03/15465 | 3 |
| 137 | 2300-18178WO | US03/15465 | 4 |
| 138 | 2300-18178WO | US03/15465 | 5 |
| 139 | 2300-18178WO | US03/15465 | 6 |
| 140 | 2300-18178WO | US03/15465 | 7 |
| 141 | 2300-18178WO | US03/15465 | 8 |
| 142 | 2300-18178WO | US03/15465 | 9 |
| 143 | 2300-18178WO | US03/15465 | 10 |
| 144 | 2300-18178WO | US03/15465 | 11 |
| 145 | 2300-18178WO | US03/15465 | 12 |
| 146 | 2300-18178WO | US03/15465 | 13 |
| 147 | 2300-18178WO | US03/15465 | 14 |
| 148 | 2300-18178WO | US03/15465 | 15 |
| 149 | 2300-18178WO | US03/15465 | 16 |
| 150 | 2300-18178WO | US03/15465 | 17 |
| 151 | 2300-18178WO | US03/15465 | 18 |
| 152 | 2300-18178WO | US03/15465 | 19 |
| 153 | 2300-18178WO | US03/15465 | 20 |
| 154 | 2300-18178WO | US03/15465 | 21 |
| 155 | 2300-18178WO | US03/15465 | 22 |
| 156 | 2300-18178WO | US03/15465 | 23 |
| 157 | 2300-18178WO | US03/15465 | 24 |
| 158 | 2300-18178WO | US03/15465 | 25 |
| 159 | 2300-18178WO | US03/15465 | 26 |
| 160 | 2300-18178WO | US03/15465 | 27 |
| 161 | 2300-18178WO | US03/15465 | 28 |
| 162 | 2300-18178WO | US03/15465 | 29 |
| 163 | 2300-18178WO | US03/15465 | 30 |
| 164 | 2300-18178WO | US03/15465 | 31 |
| 165 | 2300-18178WO | US03/15465 | 32 |
| 166 | 2300-18178WO | US03/15465 | 33 |
| 167 | 2300-18178WO | US03/15465 | 34 |
| 168 | 2300-18178WO | US03/15465 | 35 |
| 169 | 2300-18178WO | US03/15465 | 36 |
| 170 | 2300-18178WO | US03/15465 | 37 |
| 171 | 2300-18178WO | US03/15465 | 38 |
| 172 | 2300-18178WO | US03/15465 | 39 |
| 173 | 2300-18178WO | US03/15465 | 40 |
| 174 | 2300-18178WO | US03/15465 | 41 |
| 175 | 2300-18178WO | US03/15465 | 42 |
| 176 | 2300-18178WO | US03/15465 | 43 |
| 177 | 2300-18178WO | US03/15465 | 44 |
| 178 | 2300-18178WO | US03/15465 | 45 |
| 179 | 2300-18178WO | US03/15465 | 46 |
| 180 | 2300-18178WO | US03/15465 | 47 |
| 181 | 2300-18178WO | US03/15465 | 48 |
| 182 | 2300-18178WO | US03/15465 | 49 |
| 183 | 2300-18178WO | US03/15465 | 50 |
| 184 | 2300-18178WO | US03/15465 | 51 |
| 185 | 2300-18178WO | US03/15465 | 52 |
| 186 | 2300-18178WO | US03/15465 | 53 |
| 187 | 2300-18178WO | US03/15465 | 54 |
| 188 | 2300-18178WO | US03/15465 | 55 |
| 189 | 2300-18178WO | US03/15465 | 56 |
| 190 | 2300-18178WO | US03/15465 | 57 |
| 191 | 2300-18178WO | US03/15465 | 58 |
| 192 | 2300-18178WO | US03/15465 | 59 |
| 193 | 2300-18178WO | US03/15465 | 60 |
| 194 | 2300-18178WO | US03/15465 | 61 |
| 195 | 2300-18178WO | US03/15465 | 62 |
| 196 | 2300-18178WO | US03/15465 | 63 |
| 197 | 2300-18178WO | US03/15465 | 64 |
| 198 | 2300-18178WO | US03/15465 | 65 |
| 199 | 2300-18178WO | US03/15465 | 66 |
| 200 | 2300-18178WO | US03/15465 | 67 |
| 201 | 2300-18178WO | US03/15465 | 68 |
| 202 | 2300-18178WO | US03/15465 | 69 |
| 203 | 2300-18178WO | US03/15465 | 70 |
| 204 | 2300-18178WO | US03/15465 | 71 |
| 205 | 2300-18178WO | US03/15465 | 72 |
| 206 | 2300-18178WO | US03/15465 | 73 |
| 207 | 2300-18178WO | US03/15465 | 74 |
| 208 | 2300-18178WO | US03/15465 | 75 |
| 209 | 2300-18178WO | US03/15465 | 76 |
| 210 | 2300-18178WO | US03/15465 | 77 |
| 211 | 2300-18178WO | US03/15465 | 78 |
| 212 | 2300-18178WO | US03/15465 | 79 |
| 213 | 2300-18178WO | US03/15465 | 80 |
| 214 | 2300-18178WO | US03/15465 | 81 |
| 215 | 2300-18178WO | US03/15465 | 82 |
| 216 | 2300-18178WO | US03/15465 | 83 |
| 217 | 2300-18178WO | US03/15465 | 84 |
| 218 | 2300-18178WO | US03/15465 | 85 |
| 219 | 2300-18178WO | US03/15465 | 86 |
| 220 | 2300-18178WO | US03/15465 | 87 |
| 221 | 2300-18178WO | US03/15465 | 88 |
| 222 | 2300-18178WO | US03/15465 | 89 |
| 223 | 2300-18178WO | US03/15465 | 90 |
| 224 | 2300-18178WO | US03/15465 | 91 |
| 225 | 2300-18178WO | US03/15465 | 92 |
| 226 | 2300-18178WO | US03/15465 | 93 |
| 227 | 2300-18178WO | US03/15465 | 94 |
| 228 | 2300-18178WO | US03/15465 | 95 |
| 229 | 2300-18178WO | US03/15465 | 96 |
| 230 | 2300-18178WO | US03/15465 | 97 |
| 231 | 2300-18178WO | US03/15465 | 98 |
| 232 | 2300-18178WO | US03/15465 | 99 |
| 233 | 2300-18178WO | US03/15465 | 100 |
| 234 | 2300-18178WO | US03/15465 | 101 |
| 235 | 2300-18178WO | US03/15465 | 102 |
| 236 | 2300-18178WO | US03/15465 | 103 |
| 237 | 2300-18178WO | US03/15465 | 104 |
| 238 | 2300-18178WO | US03/15465 | 105 |
| 239 | 2300-18178WO | US03/15465 | 106 |
| 240 | 2300-18178WO | US03/15465 | 107 |
| 241 | 2300-18178WO | US03/15465 | 108 |
| 242 | 2300-18178WO | US03/15465 | 109 |
| 243 | 2300-18178WO | US03/15465 | 110 |
| 244 | 2300-18178WO | US03/15465 | 111 |
| 245 | 2300-18178WO | US03/15465 | 112 |
| 246 | 2300-18178WO | US03/15465 | 113 |
| 247 | 2300-18178WO | US03/15465 | 114 |
| 248 | 2300-18178WO | US03/15465 | 115 |
| 249 | 2300-18178WO | US03/15465 | 116 |
| 250 | 2300-18178WO | US03/15465 | 117 |
| 251 | 2300-18178WO | US03/15465 | 118 |
| 252 | 2300-18178WO | US03/15465 | 119 |
| 253 | 2300-18178WO | US03/15465 | 120 |
| 254 | 2300-18178WO | US03/15465 | 121 |
| 255 | 2300-18178WO | US03/15465 | 122 |
| 256 | 2300-18178WO | US03/15465 | 123 |
| 257 | 2300-18178WO | US03/15465 | 124 |
| 258 | 2300-18178WO | US03/15465 | 125 |
| 259 | 2300-18178WO | US03/15465 | 126 |
| 260 | 2300-18178WO | US03/15465 | 127 |
| 261 | 2300-18178WO | US03/15465 | 128 |
| 262 | 2300-18178WO | US03/15465 | 129 |
| 263 | 2300-18178WO | US03/15465 | 130 |
| 264 | 2300-18178WO | US03/15465 | 131 |
| 265 | 2300-18178WO | US03/15465 | 132 |
| 266 | 2300-18178WO | US03/15465 | 133 |
| 267 | 2300-18178WO | US03/15465 | 134 |
| 268 | 2300-18178WO | US03/15465 | 135 |
| 269 | 2300-18178WO | US03/15465 | 136 |
| 270 | 2300-18178WO | US03/15465 | 137 |
| 271 | 2300-18178WO | US03/15465 | 138 |
| 272 | 2300-18178WO | US03/15465 | 139 |
| 273 | 2300-18178WO | US03/15465 | 140 |
| 274 | 2300-18178WO | US03/15465 | 141 |
| 275 | 2300-18178WO | US03/15465 | 142 |
| 276 | 2300-18178WO | US03/15465 | 143 |
| 277 | 2300-18178WO | US03/15465 | 144 |
| 278 | 2300-18178WO | US03/15465 | 145 |
| 279 | 2300-18178WO | US03/15465 | 146 |
| 280 | 2300-18178WO | US03/15465 | 147 |
| 281 | 2300-18178WO | US03/15465 | 148 |
| 282 | 2300-18178WO | US03/15465 | 149 |
| 283 | 2300-18178WO | US03/15465 | 150 |
| 284 | 2300-18178WO | US03/15465 | 151 |
| 285 | 2300-18178WO | US03/15465 | 152 |
| 286 | 2300-18178WO | US03/15465 | 153 |
| 287 | 2300-18178WO | US03/15465 | 154 |
| 288 | 2300-18178WO | US03/15465 | 155 |
| 289 | 2300-18178WO | US03/15465 | 156 |
| 290 | 2300-18178WO | US03/15465 | 157 |
| 291 | 2300-18178WO | US03/15465 | 158 |
| 292 | 2300-18178WO | US03/15465 | 159 |
| 293 | 2300-18178WO | US03/15465 | 160 |
| 294 | 2300-18178WO | US03/15465 | 161 |
| 295 | 2300-18178WO | US03/15465 | 162 |
| 296 | 2300-18178WO | US03/15465 | 163 |
| 297 | 2300-18178WO | US03/15465 | 164 |
| 298 | 2300-18178WO | US03/15465 | 165 |
| 299 | 2300-18178WO | US03/15465 | 166 |
| 300 | 2300-18178WO | US03/15465 | 167 |
| 301 | 2300-18178WO | US03/15465 | 168 |
| 302 | 2300-18178WO | US03/15465 | 169 |
| 303 | 2300-18178WO | US03/15465 | 170 |
| 304 | 2300-18178WO | US03/15465 | 171 |
| 305 | 2300-18178WO | US03/15465 | 172 |
| 306 | 2300-18178WO | US03/15465 | 173 |
| 307 | 2300-18178WO | US03/15465 | 174 |
| 308 | 2300-18178WO | US03/15465 | 175 |
| 309 | 2300-18178WO | US03/15465 | 176 |
| 310 | 2300-18178WO | US03/15465 | 177 |
| 311 | 2300-18178WO | US03/15465 | 178 |
| 312 | 2300-18178WO | US03/15465 | 179 |
| 313 | 2300-18178WO | US03/15465 | 180 |
| 314 | 2300-18178WO | US03/15465 | 181 |
| 315 | 2300-18178WO | US03/15465 | 182 |
| 316 | 2300-18178WO | US03/15465 | 183 |
| 317 | 2300-18178WO | US03/15465 | 184 |
| 318 | 2300-18178WO | US03/15465 | 185 |
| 319 | 2300-18178WO | US03/15465 | 186 |
| 320 | 2300-18178WO | US03/15465 | 187 |
| 321 | 2300-18178WO | US03/15465 | 188 |
| 322 | 2300-18178WO | US03/15465 | 189 |
| 323 | 2300-18178WO | US03/15465 | 190 |
| 324 | 2300-18178WO | US03/15465 | 191 |
| 325 | 2300-18178WO | US03/15465 | 192 |
| 326 | 2300-18178WO | US03/15465 | 193 |
| 327 | 2300-18178WO | US03/15465 | 194 |
| 328 | 2300-18178WO | US03/15465 | 195 |
| 329 | 2300-18178WO | US03/15465 | 196 |
| 330 | 2300-18178WO | US03/15465 | 197 |
| 331 | 2300-18178WO | US03/15465 | 198 |
| 332 | 2300-18178WO | US03/15465 | 199 |
| 333 | 2300-18178WO | US03/15465 | 200 |
| 334 | 2300-18178WO | US03/15465 | 201 |
| 335 | 2300-18178WO | US03/15465 | 202 |
| 336 | 2300-18178WO | US03/15465 | 203 |
| 337 | 2300-18178WO | US03/15465 | 204 |
| 338 | 2300-18178WO | US03/15465 | 205 |
| 339 | 2300-18178WO | US03/15465 | 206 |
| 340 | 2300-18178WO | US03/15465 | 207 |
| 341 | 2300-18178WO | US03/15465 | 208 |
| 342 | 2300-18178WO | US03/15465 | 209 |
| 343 | 2300-18178WO | US03/15465 | 210 |
| 344 | 2300-18178WO | US03/15465 | 211 |
| 345 | 2300-18178WO | US03/15465 | 212 |
| 346 | 2300-18178WO | US03/15465 | 213 |
| 347 | 2300-18178WO | US03/15465 | 214 |
| 348 | 2300-18178WO | US03/15465 | 215 |
| 349 | 2300-18178WO | US03/15465 | 216 |
| 350 | 2300-18178WO | US03/15465 | 217 |
| 351 | 2300-18178WO | US03/15465 | 218 |
| 352 | 2300-18178WO | US03/15465 | 219 |
| 353 | 2300-18178WO | US03/15465 | 220 |
| 354 | 2300-18178WO | US03/15465 | 221 |
| 355 | 2300-18178WO | US03/15465 | 222 |
| 356 | 2300-18178WO | US03/15465 | 223 |
| 357 | 2300-18178WO | US03/15465 | 224 |
| 358 | 2300-18178WO | US03/15465 | 225 |
| 359 | 2300-18178WO | US03/15465 | 226 |
| 360 | 2300-18178WO | US03/15465 | 227 |
| 361 | 2300-18178WO | US03/15465 | 228 |
| 362 | 2300-18178WO | US03/15465 | 229 |
| 363 | 2300-18178WO | US03/15465 | 230 |
| 364 | 2300-18178WO | US03/15465 | 231 |
| 365 | 2300-18178WO | US03/15465 | 232 |
| 366 | 2300-18178WO | US03/15465 | 233 |
| 367 | 2300-18178WO | US03/15465 | 234 |
| 368 | 2300-18178WO | US03/15465 | 235 |
| 369 | 2300-18178WO | US03/15465 | 236 |
| 370 | 2300-18178WO | US03/15465 | 237 |
| 371 | 2300-18178WO | US03/15465 | 238 |
| 372 | 2300-18178WO | US03/15465 | 239 |
| 373 | 2300-18178WO | US03/15465 | 240 |
| 374 | 2300-18178WO | US03/15465 | 241 |
| 375 | 2300-18178WO | US03/15465 | 242 |
| 376 | 2300-18178WO | US03/15465 | 243 |
| 377 | 2300-18178WO | US03/15465 | 244 |
| 378 | 2300-18178WO | US03/15465 | 245 |
| 379 | 2300-18178WO | US03/15465 | 246 |
| 380 | 2300-18178WO | US03/15465 | 247 |
| 381 | 2300-18178WO | US03/15465 | 248 |
| 382 | 2300-18178WO | US03/15465 | 249 |
| 383 | 2300-18178WO | US03/15465 | 250 |
| 384 | 2300-18178WO | US03/15465 | 251 |
| 385 | 2300-18178WO | US03/15465 | 252 |
| 386 | 2300-18178WO | US03/15465 | 253 |
| 387 | 2300-18178WO | US03/15465 | 254 |
| 388 | 2300-18178WO | US03/15465 | 255 |
| 389 | 2300-18178WO | US03/15465 | 256 |
| 390 | 2300-18178WO | US03/15465 | 257 |
| 391 | 2300-18178WO | US03/15465 | 258 |
| 392 | 2300-18178WO | US03/15465 | 259 |
| 393 | 2300-18178WO | US03/15465 | 260 |
| 394 | 2300-18178WO | US03/15465 | 261 |
| 395 | 2300-18178WO | US03/15465 | 262 |
| 396 | 2300-18178WO | US03/15465 | 263 |
| 397 | 2300-18178WO | US03/15465 | 264 |
| 398 | 2300-18178WO | US03/15465 | 265 |
| 399 | 2300-18178WO | US03/15465 | 266 |
| 400 | 2300-18178WO | US03/15465 | 267 |
| 401 | 2300-18178WO | US03/15465 | 268 |
| 402 | 2300-18178WO | US03/15465 | 269 |
| 403 | 2300-18178WO | US03/15465 | 270 |
| 404 | 2300-18178WO | US03/15465 | 271 |
| 405 | 2300-18178WO | US03/15465 | 272 |
| 406 | 2300-18178WO | US03/15465 | 273 |
| 407 | 2300-18178WO | US03/15465 | 274 |
| 408 | 2300-18178WO | US03/15465 | 275 |
| 409 | 2300-18178WO | US03/15465 | 276 |
| 410 | 2300-18178WO | US03/15465 | 277 |
| 411 | 2300-18178WO | US03/15465 | 278 |
| 412 | 2300-18178WO | US03/15465 | 279 |
| 413 | 2300-18178WO | US03/15465 | 280 |
| 414 | 2300-18178WO | US03/15465 | 281 |
| 415 | 2300-18178WO | US03/15465 | 282 |
| 416 | 2300-18178WO | US03/15465 | 283 |
| 417 | 2300-18178WO | US03/15465 | 284 |
| 418 | 2300-18178WO | US03/15465 | 285 |
| 419 | 2300-18178WO | US03/15465 | 286 |
| 420 | 2300-18178WO | US03/15465 | 287 |
| 421 | 2300-18178WO | US03/15465 | 288 |
| 422 | 2300-18178WO | US03/15465 | 289 |
| 423 | 2300-18178WO | US03/15465 | 290 |
| 424 | 2300-18178WO | US03/15465 | 291 |
| 425 | 2300-18178WO | US03/15465 | 292 |
| 426 | 2300-18178WO | US03/15465 | 293 |
| 427 | 2300-18178WO | US03/15465 | 294 |
| 428 | 2300-18178WO | US03/15465 | 295 |
| 429 | 2300-18178WO | US03/15465 | 296 |
| 430 | 2300-18178WO | US03/15465 | 297 |
| 431 | 2300-18178WO | US03/15465 | 298 |
| 432 | 2300-18178WO | US03/15465 | 299 |
| 433 | 2300-18178WO | US03/15465 | 300 |
| 434 | 2300-18178WO | US03/15465 | 301 |
| 435 | 2300-18178WO | US03/15465 | 302 |
| 436 | 2300-18178WO | US03/15465 | 303 |
| 437 | 2300-18178WO | US03/15465 | 304 |
| 438 | 2300-18178WO | US03/15465 | 305 |
| 439 | 2300-18178WO | US03/15465 | 306 |
| 440 | 2300-18178WO | US03/15465 | 307 |
| 441 | 2300-18178WO | US03/15465 | 308 |
| 442 | 2300-18178WO | US03/15465 | 309 |
| 443 | 2300-18178WO | US03/15465 | 310 |
| 444 | 2300-18178WO | US03/15465 | 311 |
| 445 | 2300-18178WO | US03/15465 | 312 |
| 446 | 2300-18178WO | US03/15465 | 313 |
| 447 | 2300-18178WO | US03/15465 | 314 |
| 448 | 2300-18178WO | US03/15465 | 315 |
| 449 | 2300-18178WO | US03/15465 | 316 |
| 450 | 2300-18178WO | US03/15465 | 317 |
| 451 | 2300-18178WO | US03/15465 | 318 |
| 452 | 2300-18178WO | US03/15465 | 319 |
| 453 | 2300-18178WO | US03/15465 | 320 |
| 454 | 2300-18178WO | US03/15465 | 321 |
| 455 | 2300-18178WO | US03/15465 | 322 |
| 456 | 2300-18178WO | US03/15465 | 323 |
| 457 | 2300-18178WO | US03/15465 | 324 |
| 458 | 2300-18178WO | US03/15465 | 325 |
| 459 | 2300-18178WO | US03/15465 | 326 |
| 460 | 2300-18178WO | US03/15465 | 327 |
| 461 | 2300-18178WO | US03/15465 | 328 |
| 462 | 2300-18178WO | US03/15465 | 329 |
| 463 | 2300-18178WO | US03/15465 | 330 |
| 464 | 2300-18178WO | US03/15465 | 331 |
| 465 | 2300-18178WO | US03/15465 | 332 |
| 466 | 2300-18178WO | US03/15465 | 333 |
| 467 | 2300-18178WO | US03/15465 | 334 |
| 468 | 2300-18178WO | US03/15465 | 335 |
| 469 | 2300-18178WO | US03/15465 | 336 |
| 470 | 2300-18178WO | US03/15465 | 337 |
| 471 | 2300-18178WO | US03/15465 | 338 |
| 472 | 2300-18178WO | US03/15465 | 339 |
| 473 | 2300-18178WO | US03/15465 | 340 |
| 474 | 2300-18178WO | US03/15465 | 341 |
| 475 | 2300-18178WO | US03/15465 | 342 |
| 476 | 2300-18178WO | US03/15465 | 343 |
| 477 | 2300-18178WO | US03/15465 | 344 |
| 478 | 2300-18178WO | US03/15465 | 345 |
| 479 | 2300-18178WO | US03/15465 | 346 |
| 480 | 2300-18178WO | US03/15465 | 347 |
| 481 | 2300-18178WO | US03/15465 | 348 |
| 482 | 2300-18178WO | US03/15465 | 349 |
| 483 | 2300-18178WO | US03/15465 | 350 |
| 484 | 2300-18178WO | US03/15465 | 351 |
| 485 | 2300-18178WO | US03/15465 | 352 |
| 486 | 2300-18178WO | US03/15465 | 353 |
| 487 | 2300-18178WO | US03/15465 | 354 |
| 488 | 2300-18178WO | US03/15465 | 355 |
| 489 | 2300-18178WO | US03/15465 | 356 |
| 490 | 2300-18178WO | US03/15465 | 357 |
| 491 | 2300-18178WO | US03/15465 | 358 |
| 492 | 2300-18178WO | US03/15465 | 359 |
| 493 | 2300-18178WO | US03/15465 | 360 |
| 494 | 2300-18178WO | US03/15465 | 361 |
| 495 | 2300-18178WO | US03/15465 | 362 |
| 496 | 2300-18178WO | US03/15465 | 363 |
| 497 | 2300-18178WO | US03/15465 | 364 |
| 498 | 2300-18178WO | US03/15465 | 365 |
| 499 | 2300-18178WO | US03/15465 | 366 |
| 500 | 2300-18178WO | US03/15465 | 367 |
| 501 | 2300-18178WO | US03/15465 | 368 |
| 502 | 2300-18178WO | US03/15465 | 369 |
| 503 | 2300-18178WO | US03/15465 | 370 |
| 504 | 2300-18178WO | US03/15465 | 371 |
| 505 | 2300-18178WO | US03/15465 | 372 |
| 506 | 2300-18178WO | US03/15465 | 373 |
| 507 | 2300-18178WO | US03/15465 | 374 |
| 508 | 2300-18178WO | US03/15465 | 375 |
| 509 | 2300-18178WO | US03/15465 | 376 |
| 510 | 2300-18178WO | US03/15465 | 377 |
| 511 | 2300-18178WO | US03/15465 | 378 |
| 512 | 2300-18178WO | US03/15465 | 379 |
| 513 | 2300-18178WO | US03/15465 | 380 |
| 514 | 2300-18178WO | US03/15465 | 381 |
| 515 | 2300-18178WO | US03/15465 | 382 |
| 516 | 2300-18178WO | US03/15465 | 383 |
| 517 | 2300-18178WO | US03/15465 | 384 |
| 518 | 2300-18178WO | US03/15465 | 385 |
| 519 | 2300-18178WO | US03/15465 | 386 |
| 520 | 2300-18178WO | US03/15465 | 387 |
| 521 | 2300-18178WO | US03/15465 | 388 |
| 522 | 2300-18178WO | US03/15465 | 389 |
| 523 | 2300-18178WO | US03/15465 | 390 |
| 524 | 2300-18178WO | US03/15465 | 391 |
| 525 | 2300-18178WO | US03/15465 | 392 |
| 526 | 2300-18178WO | US03/15465 | 393 |
| 527 | 2300-18178WO | US03/15465 | 394 |
| 528 | 2300-18178WO | US03/15465 | 395 |
| 529 | 2300-18178WO | US03/15465 | 396 |
| 530 | 2300-18178WO | US03/15465 | 397 |
| 531 | 2300-18178WO | US03/15465 | 398 |
| 532 | 2300-18178WO | US03/15465 | 399 |
| 533 | 2300-18178WO | US03/15465 | 400 |
| 534 | 2300-18178WO | US03/15465 | 401 |
| 535 | 2300-18178WO | US03/15465 | 402 |
| 536 | 2300-18178WO | US03/15465 | 403 |
| 537 | 2300-18178WO | US03/15465 | 404 |
| 538 | 2300-18178WO | US03/15465 | 405 |
| 539 | 2300-18178WO | US03/15465 | 406 |
| 540 | 2300-18178WO | US03/15465 | 407 |
| 541 | 2300-18178WO | US03/15465 | 408 |
| 542 | 2300-18178WO | US03/15465 | 409 |
| 543 | 2300-18178WO | US03/15465 | 410 |
| 544 | 2300-18178WO | US03/15465 | 411 |
| 545 | 2300-18178WO | US03/15465 | 412 |
| 546 | 2300-18178WO | US03/15465 | 413 |
| 547 | 2300-18178WO | US03/15465 | 414 |
| 548 | 2300-18178WO | US03/15465 | 415 |
| 549 | 2300-18178WO | US03/15465 | 416 |
| 550 | 2300-18178WO | US03/15465 | 417 |
| 551 | 2300-18178WO | US03/15465 | 418 |
| 552 | 2300-18178WO | US03/15465 | 419 |
| 553 | 2300-18178WO | US03/15465 | 420 |
| 554 | 2300-18178WO | US03/15465 | 421 |
| 555 | 2300-18178WO | US03/15465 | 422 |
| 556 | 2300-18178WO | US03/15465 | 423 |
| 557 | 2300-18178WO | US03/15465 | 424 |
| 558 | 2300-18178WO | US03/15465 | 425 |
| 559 | 2300-18178WO | US03/15465 | 426 |
| 560 | 2300-18178WO | US03/15465 | 427 |
| 561 | 2300-18178WO | US03/15465 | 428 |
| 562 | 2300-18178WO | US03/15465 | 429 |
| 563 | 2300-18178WO | US03/15465 | 430 |
| 564 | 2300-18178WO | US03/15465 | 431 |
| 565 | 2300-18178WO | US03/15465 | 432 |
| 566 | 2300-18178WO | US03/15465 | 433 |
| 567 | 2300-18178WO | US03/15465 | 434 |
| 568 | 2300-18178WO | US03/15465 | 435 |
| 569 | 2300-18178WO | US03/15465 | 436 |
| 570 | 2300-18178WO | US03/15465 | 437 |
| 571 | 2300-18178WO | US03/15465 | 438 |
| 572 | 2300-18178WO | US03/15465 | 439 |
| 573 | 2300-18178WO | US03/15465 | 440 |
| 574 | 2300-18178WO | US03/15465 | 441 |
| 575 | 2300-18178WO | US03/15465 | 442 |
| 576 | 2300-18178WO | US03/15465 | 443 |
| 577 | 2300-18178WO | US03/15465 | 444 |
| 578 | 2300-18178WO | US03/15465 | 445 |
| 579 | 2300-18178WO | US03/15465 | 446 |
| 580 | 2300-18178WO | US03/15465 | 447 |
| 581 | 2300-18178WO | US03/15465 | 448 |
| 582 | 2300-18178WO | US03/15465 | 449 |
| 583 | 2300-18178WO | US03/15465 | 450 |
| 584 | 2300-18178WO | US03/15465 | 451 |
| 585 | 2300-18178WO | US03/15465 | 452 |
| 586 | 2300-18178WO | US03/15465 | 453 |
| 587 | 2300-18178WO | US03/15465 | 454 |
| 588 | 2300-18178WO | US03/15465 | 455 |
| 589 | 2300-18178WO | US03/15465 | 456 |
| 590 | 2300-18178WO | US03/15465 | 457 |
| 591 | 2300-18178WO | US03/15465 | 458 |
| 592 | 2300-18178WO | US03/15465 | 459 |
| 593 | 2300-18178WO | US03/15465 | 460 |
| 594 | 2300-18178WO | US03/15465 | 461 |
| 595 | 2300-18178WO | US03/15465 | 462 |
| 596 | 2300-18178WO | US03/15465 | 463 |
| 597 | 2300-18178WO | US03/15465 | 464 |
| 598 | 2300-18178WO | US03/15465 | 465 |
| 599 | 2300-18178WO | US03/15465 | 466 |
| 600 | 2300-18178WO | US03/15465 | 467 |
| 601 | 2300-18178WO | US03/15465 | 468 |
| 602 | 2300-18178WO | US03/15465 | 469 |
| 603 | 2300-18178WO | US03/15465 | 470 |
| 604 | 2300-18178WO | US03/15465 | 471 |
| 605 | 2300-18178WO | US03/15465 | 472 |
| 606 | 2300-18178WO | US03/15465 | 473 |
| 607 | 2300-18178WO | US03/15465 | 474 |
| 608 | 2300-18178WO | US03/15465 | 475 |
| 609 | 2300-18178WO | US03/15465 | 476 |
| 610 | 2300-18178WO | US03/15465 | 477 |
| 611 | 2300-18178WO | US03/15465 | 478 |
| 612 | 2300-18178WO | US03/15465 | 479 |
| 613 | 2300-18178WO | US03/15465 | 480 |
| 614 | 2300-18178WO | US03/15465 | 481 |
| 615 | 2300-18178WO | US03/15465 | 482 |
| 616 | 2300-18178WO | US03/15465 | 483 |
| 617 | 2300-18178WO | US03/15465 | 484 |
| 618 | 2300-18178WO | US03/15465 | 485 |
| 619 | 2300-18178WO | US03/15465 | 486 |
| 620 | 2300-18178WO | US03/15465 | 487 |
| 621 | 2300-18178WO | US03/15465 | 488 |
| 622 | 2300-18178WO | US03/15465 | 489 |
| 623 | 2300-18178WO | US03/15465 | 490 |
| 624 | 2300-18178WO | US03/15465 | 491 |
| 625 | 2300-18178WO | US03/15465 | 492 |
| 626 | 2300-18178WO | US03/15465 | 493 |
| 627 | 2300-18178WO | US03/15465 | 494 |
| 628 | 2300-18178WO | US03/15465 | 495 |
| 629 | 2300-18178WO | US03/15465 | 496 |
| 630 | 2300-18178WO | US03/15465 | 497 |
| 631 | 2300-18178WO | US03/15465 | 498 |
| 632 | 2300-18178WO | US03/15465 | 499 |
| 633 | 2300-18178WO | US03/15465 | 500 |
| 634 | 2300-18178WO | US03/15465 | 501 |
| 635 | 2300-18178WO | US03/15465 | 502 |
| 636 | 2300-18178WO | US03/15465 | 503 |
| 637 | 2300-18178WO | US03/15465 | 504 |
| 638 | 2300-18178WO | US03/15465 | 505 |
| 639 | 2300-18178WO | US03/15465 | 506 |
| 640 | 2300-18178WO | US03/15465 | 507 |
| 641 | 2300-18178WO | US03/15465 | 508 |
| 642 | 2300-18178WO | US03/15465 | 509 |
| 643 | 2300-18178WO | US03/15465 | 510 |
| 644 | 2300-18178WO | US03/15465 | 511 |
| 645 | 2300-18178WO | US03/15465 | 512 |
| 646 | 2300-18178WO | US03/15465 | 513 |
| 647 | 2300-18178WO | US03/15465 | 514 |
| 648 | 2300-18178WO | US03/15465 | 515 |
| 649 | 2300-18178WO | US03/15465 | 516 |
| 650 | 2300-18178WO | US03/15465 | 517 |
| 651 | 2300-18178WO | US03/15465 | 518 |
| 652 | 2300-18178WO | US03/15465 | 519 |
| 653 | 2300-18178WO | US03/15465 | 520 |
| 654 | 2300-18178WO | US03/15465 | 521 |
| 655 | 2300-18178WO | US03/15465 | 522 |
| 656 | 2300-18178WO | US03/15465 | 523 |
| 657 | 2300-18178WO | US03/15465 | 524 |
| 658 | 2300-18178WO | US03/15465 | 525 |
| 659 | 2300-18178WO | US03/15465 | 526 |
| 660 | 2300-18178WO | US03/15465 | 527 |
| 661 | 2300-18178WO | US03/15465 | 528 |
| 662 | 2300-18178WO | US03/15465 | 529 |
| 663 | 2300-18178WO | US03/15465 | 530 |
| 664 | 2300-18178WO | US03/15465 | 531 |
| 665 | 2300-18178WO | US03/15465 | 532 |
| 666 | 2300-18178WO | US03/15465 | 533 |
| 667 | 2300-18178WO | US03/15465 | 534 |
| 668 | 2300-18178WO | US03/15465 | 535 |
| 669 | 2300-18178WO | US03/15465 | 536 |
| 670 | 2300-18178WO | US03/15465 | 537 |
| 671 | 2300-18178WO | US03/15465 | 538 |
| 672 | 2300-18178WO | US03/15465 | 539 |
| 673 | 2300-18178WO | US03/15465 | 540 |
| 674 | 2300-18178WO | US03/15465 | 541 |
| 675 | 2300-18178WO | US03/15465 | 542 |
| 676 | 2300-18178WO | US03/15465 | 543 |
| 677 | 2300-18178WO | US03/15465 | 544 |
| 678 | 2300-18178WO | US03/15465 | 545 |
| 679 | 2300-18178WO | US03/15465 | 546 |
| 680 | 2300-18178WO | US03/15465 | 547 |
| 681 | 2300-18178WO | US03/15465 | 548 |
| 682 | 2300-18178WO | US03/15465 | 549 |
| 683 | 2300-18178WO | US03/15465 | 550 |
| 684 | 2300-18178WO | US03/15465 | 551 |
| 685 | 2300-18178WO | US03/15465 | 552 |
| 686 | 2300-18178WO | US03/15465 | 553 |
| 687 | 2300-18178WO | US03/15465 | 554 |
| 688 | 2300-18178WO | US03/15465 | 555 |
| 689 | 2300-18178WO | US03/15465 | 556 |
| 690 | 2300-18178WO | US03/15465 | 557 |
| 691 | 2300-18178WO | US03/15465 | 558 |
| 692 | 2300-18178WO | US03/15465 | 559 |
| 693 | 2300-18178WO | US03/15465 | 560 |
| 694 | 2300-18178WO | US03/15465 | 561 |
| 695 | 2300-18178WO | US03/15465 | 562 |
| 696 | 2300-18178WO | US03/15465 | 563 |
| 697 | 2300-18178WO | US03/15465 | 564 |
| 698 | 2300-18178WO | US03/15465 | 565 |
| 699 | 2300-18178WO | US03/15465 | 566 |
| 700 | 2300-18178WO | US03/15465 | 567 |
| 701 | 2300-18178WO | US03/15465 | 568 |
| 702 | 2300-18178WO | US03/15465 | 569 |
| 703 | 2300-18178WO | US03/15465 | 570 |
| 704 | 2300-18178WO | US03/15465 | 571 |
| 705 | 2300-18178WO | US03/15465 | 572 |
| 706 | 2300-18178WO | US03/15465 | 573 |
| 707 | 2300-18178WO | US03/15465 | 574 |
| 708 | 2300-18178WO | US03/15465 | 575 |
| 709 | 2300-18178WO | US03/15465 | 576 |
| 710 | 2300-18178WO | US03/15465 | 577 |
| 711 | 2300-18178WO | US03/15465 | 578 |
| 712 | 2300-18178WO | US03/15465 | 579 |
| 713 | 2300-18178WO | US03/15465 | 580 |
| 714 | 2300-18178WO | US03/15465 | 581 |
| 715 | 2300-18178WO | US03/15465 | 582 |
| 716 | 2300-18178WO | US03/15465 | 583 |
| 717 | 2300-18178WO | US03/15465 | 584 |
| 718 | 2300-18178WO | US03/15465 | 585 |
| 719 | 2300-18178WO | US03/15465 | 586 |
| 720 | 2300-18178WO | US03/15465 | 587 |
| 721 | 2300-18178WO | US03/15465 | 588 |
| 722 | 2300-18178WO | US03/15465 | 589 |
| 723 | 2300-18178WO | US03/15465 | 590 |
| 724 | 2300-18178WO | US03/15465 | 591 |
| 725 | 2300-18178WO | US03/15465 | 592 |
| 726 | 2300-18178WO | US03/15465 | 593 |
| 727 | 2300-18178WO | US03/15465 | 594 |
| 728 | 2300-18178WO | US03/15465 | 595 |
| 729 | 2300-18178WO | US03/15465 | 596 |
| 730 | 2300-18178WO | US03/15465 | 597 |
| 731 | 2300-18178WO | US03/15465 | 598 |
| 732 | 2300-18178WO | US03/15465 | 599 |
| 733 | 2300-18178WO | US03/15465 | 600 |
| 734 | 2300-18178WO | US03/15465 | 601 |
| 735 | 2300-18178WO | US03/15465 | 602 |
| 736 | 2300-18178WO | US03/15465 | 603 |
| 737 | 2300-18178WO | US03/15465 | 604 |
| 738 | 2300-18178WO | US03/15465 | 605 |
| 739 | 2300-18178WO | US03/15465 | 606 |
| 740 | 2300-18178WO | US03/15465 | 607 |
| 741 | 2300-18178WO | US03/15465 | 608 |
| 742 | 2300-18178WO | US03/15465 | 609 |
| 743 | 2300-18178WO | US03/15465 | 610 |
| 744 | 2300-18178WO | US03/15465 | 611 |
| 745 | 2300-18178WO | US03/15465 | 612 |
| 746 | 2300-18178WO | US03/15465 | 613 |
| 747 | 2300-18178WO | US03/15465 | 614 |
| 748 | 2300-18178WO | US03/15465 | 615 |
| 749 | 2300-18178WO | US03/15465 | 616 |
| 750 | 2300-18178WO | US03/15465 | 617 |
| 751 | 2300-18178WO | US03/15465 | 618 |
| 752 | 2300-18178WO | US03/15465 | 619 |
| 753 | 2300-18178WO | US03/15465 | 620 |
| 754 | 2300-18178WO | US03/15465 | 621 |
| 755 | 2300-18178WO | US03/15465 | 622 |
| 756 | 2300-18178WO | US03/15465 | 623 |
| 757 | 2300-18178WO | US03/15465 | 624 |
| 758 | 2300-18178WO | US03/15465 | 625 |
| 759 | 2300-18178WO | US03/15465 | 626 |
| 760 | 2300-18178WO | US03/15465 | 627 |
| 761 | 2300-18178WO | US03/15465 | 628 |
| 762 | 2300-18178WO | US03/15465 | 629 |
| 763 | 2300-18178WO | US03/15465 | 630 |
| 764 | 2300-18178WO | US03/15465 | 631 |
| 765 | 2300-18178WO | US03/15465 | 632 |
| 766 | 2300-18178WO | US03/15465 | 633 |
| 767 | 2300-18178WO | US03/15465 | 634 |
| 768 | 2300-18178WO | US03/15465 | 635 |
| 769 | 2300-18178WO | US03/15465 | 636 |
| 770 | 2300-18178WO | US03/15465 | 637 |
| 771 | 2300-18178WO | US03/15465 | 638 |
| 772 | 2300-18178WO | US03/15465 | 639 |
| 773 | 2300-18178WO | US03/15465 | 640 |
| 774 | 2300-18178WO | US03/15465 | 641 |
| 775 | 2300-18178WO | US03/15465 | 642 |
| 776 | 2300-18178WO | US03/15465 | 643 |
| 777 | 2300-18178WO | US03/15465 | 644 |
| 778 | 2300-18178WO | US03/15465 | 645 |
| 779 | 2300-18178WO | US03/15465 | 646 |
| 780 | 2300-18178WO | US03/15465 | 647 |
| 781 | 2300-18178WO | US03/15465 | 648 |
| 782 | 2300-18178WO | US03/15465 | 649 |
| 783 | 2300-18178WO | US03/15465 | 650 |
| 784 | 2300-18178WO | US03/15465 | 651 |
| 785 | 2300-18178WO | US03/15465 | 652 |
| 786 | 2300-18178WO | US03/15465 | 653 |
| 787 | 2300-18178WO | US03/15465 | 654 |
| 788 | 2300-18178WO | US03/15465 | 655 |
| 789 | 2300-18178WO | US03/15465 | 656 |
| 790 | 2300-18178WO | US03/15465 | 657 |
| 791 | 2300-18178WO | US03/15465 | 658 |
| 792 | 2300-18178WO | US03/15465 | 659 |
| 793 | 2300-18178WO | US03/15465 | 660 |
| 794 | 2300-18178WO | US03/15465 | 661 |
| 795 | 2300-18178WO | US03/15465 | 662 |
| 796 | 2300-18178WO | US03/15465 | 663 |
| 797 | 2300-18178WO | US03/15465 | 664 |
| 798 | 2300-18178WO | US03/15465 | 665 |
| 799 | 2300-18178WO | US03/15465 | 666 |
| 800 | 2300-18178WO | US03/15465 | 667 |
| 801 | 2300-18178WO | US03/15465 | 668 |
| 802 | 2300-18178WO | US03/15465 | 669 |
| 803 | 2300-18178WO | US03/15465 | 670 |
| 804 | 2300-18178WO | US03/15465 | 671 |
| 805 | 2300-18178WO | US03/15465 | 672 |
| 806 | 2300-18178WO | US03/15465 | 673 |
| 807 | 2300-18178WO | US03/15465 | 674 |
| 808 | 2300-18178WO | US03/15465 | 675 |
| 809 | 2300-18178WO | US03/15465 | 676 |
| 810 | 2300-18178WO | US03/15465 | 677 |
| 811 | 2300-18178WO | US03/15465 | 678 |
| 812 | 2300-18178WO | US03/15465 | 679 |
| 813 | 2300-18178WO | US03/15465 | 680 |
| 814 | 2300-18178WO | US03/15465 | 681 |
| 815 | 2300-18178WO | US03/15465 | 682 |
| 816 | 2300-18178WO | US03/15465 | 683 |
| 817 | 2300-18178WO | US03/15465 | 684 |
| 818 | 2300-18178WO | US03/15465 | 685 |
| 819 | 2300-18178WO | US03/15465 | 686 |
| 820 | 2300-18178WO | US03/15465 | 687 |
| 821 | 2300-18178WO | US03/15465 | 688 |
| 822 | 2300-18178WO | US03/15465 | 689 |
| 823 | 2300-18178WO | US03/15465 | 690 |
| 824 | 2300-18178WO | US03/15465 | 691 |
| 825 | 2300-18178WO | US03/15465 | 692 |
| 826 | 2300-18178WO | US03/15465 | 693 |
| 827 | 2300-18178WO | US03/15465 | 694 |
| 828 | 2300-18178WO | US03/15465 | 695 |
| 829 | 2300-18178WO | US03/15465 | 696 |
| 830 | 2300-18178WO | US03/15465 | 697 |
| 831 | 2300-18178WO | US03/15465 | 698 |
| 832 | 2300-18178WO | US03/15465 | 699 |
| 833 | 2300-18178WO | US03/15465 | 700 |
| 834 | 2300-18178WO | US03/15465 | 701 |
| 835 | 2300-18178WO | US03/15465 | 702 |
| 836 | 2300-18178WO | US03/15465 | 703 |
| 837 | 2300-18178WO | US03/15465 | 704 |
| 838 | 2300-18178WO | US03/15465 | 705 |
| 839 | 2300-18178WO | US03/15465 | 706 |
| 840 | 2300-18178WO | US03/15465 | 707 |
| 841 | 2300-18178WO | US03/15465 | 708 |
| 842 | 2300-18178WO | US03/15465 | 709 |
| 843 | 2300-18178WO | US03/15465 | 710 |
| 844 | 2300-18178WO | US03/15465 | 711 |
| 845 | 2300-18178WO | US03/15465 | 712 |
| 846 | 2300-18178WO | US03/15465 | 713 |
| 847 | 2300-18178WO | US03/15465 | 714 |
| 848 | 2300-18178WO | US03/15465 | 715 |
| 849 | 2300-18178WO | US03/15465 | 716 |
| 850 | 2300-18178WO | US03/15465 | 717 |
| 851 | 2300-18178WO | US03/15465 | 718 |
| 852 | 2300-18178WO | US03/15465 | 719 |
| 853 | 2300-18178WO | US03/15465 | 720 |
| 854 | 2300-18178WO | US03/15465 | 721 |
| 855 | 2300-18178WO | US03/15465 | 722 |
| 856 | 2300-18178WO | US03/15465 | 723 |
| 857 | 2300-18178WO | US03/15465 | 724 |
| 858 | 2300-18178WO | US03/15465 | 725 |
| 859 | 2300-18178WO | US03/15465 | 726 |
| 860 | 2300-18178WO | US03/15465 | 727 |
| 861 | 2300-18178WO | US03/15465 | 728 |
| 862 | 2300-18178WO | US03/15465 | 729 |
| 863 | 2300-18178WO | US03/15465 | 730 |
| 864 | 2300-18178WO | US03/15465 | 731 |
| 865 | 2300-18178WO | US03/15465 | 732 |
| 866 | 2300-18178WO | US03/15465 | 733 |
| 867 | 2300-18178WO | US03/15465 | 734 |
| 868 | 2300-18178WO | US03/15465 | 735 |
| 869 | 2300-18178WO | US03/15465 | 736 |
| 870 | 2300-18178WO | US03/15465 | 737 |
| 871 | 2300-18178WO | US03/15465 | 738 |
| 872 | 2300-18178WO | US03/15465 | 739 |
| 873 | 2300-18178WO | US03/15465 | 740 |
| 874 | 2300-18178WO | US03/15465 | 741 |
| 875 | 2300-18178WO | US03/15465 | 742 |
| 876 | 2300-18178WO | US03/15465 | 743 |
| 877 | 2300-18178WO | US03/15465 | 744 |
| 878 | 2300-18178WO | US03/15465 | 745 |
| 879 | 2300-18178WO | US03/15465 | 746 |
| 880 | 2300-18178WO | US03/15465 | 747 |
| 881 | 2300-18178WO | US03/15465 | 748 |
| 882 | 2300-18178WO | US03/15465 | 749 |
| 883 | 2300-18178WO | US03/15465 | 750 |
| 884 | 2300-18178WO | US03/15465 | 751 |
| 885 | 2300-18178WO | US03/15465 | 752 |
| 886 | 2300-18178WO | US03/15465 | 753 |
| 887 | 2300-18178WO | US03/15465 | 754 |
| 888 | 2300-18178WO | US03/15465 | 755 |
| 889 | 2300-18178WO | US03/15465 | 756 |
| 890 | 2300-18178WO | US03/15465 | 757 |
| 891 | 2300-18178WO | US03/15465 | 758 |
| 892 | 2300-18178WO | US03/15465 | 759 |
| 893 | 2300-18178WO | US03/15465 | 760 |
| 894 | 2300-18178WO | US03/15465 | 761 |
| 895 | 2300-18178WO | US03/15465 | 762 |
| 896 | 2300-18178WO | US03/15465 | 763 |
| 897 | 2300-18178WO | US03/15465 | 764 |
| 898 | 2300-18178WO | US03/15465 | 765 |
| 899 | 2300-18178WO | US03/15465 | 766 |
| 900 | 2300-18178WO | US03/15465 | 767 |
| 901 | 2300-18178WO | US03/15465 | 768 |
| 902 | 2300-18178WO | US03/15465 | 769 |
| 903 | 2300-18178WO | US03/15465 | 770 |
| 904 | 2300-18178WO | US03/15465 | 771 |
| 905 | 2300-18178WO | US03/15465 | 772 |
| 906 | 2300-18178WO | US03/15465 | 773 |
| 907 | 2300-18178WO | US03/15465 | 774 |
| 908 | 2300-18178WO | US03/15465 | 775 |
| 909 | 2300-18178WO | US03/15465 | 776 |
| 910 | 2300-18178WO | US03/15465 | 777 |
| 911 | 2300-18178WO | US03/15465 | 778 |
| 912 | 2300-18178WO | US03/15465 | 779 |
| 913 | 2300-18178WO | US03/15465 | 780 |
| 914 | 2300-18178WO | US03/15465 | 781 |
| 915 | 2300-18178WO | US03/15465 | 782 |
| 916 | 2300-18178WO | US03/15465 | 783 |
| 917 | 2300-18178WO | US03/15465 | 784 |
| 918 | 2300-18178WO | US03/15465 | 785 |
| 919 | 2300-18178WO | US03/15465 | 786 |
| 920 | 2300-18178WO | US03/15465 | 787 |
| 921 | 2300-18178WO | US03/15465 | 788 |
| 922 | 2300-18178WO | US03/15465 | 789 |
| 923 | 2300-18178WO | US03/15465 | 790 |
| 924 | 2300-18178WO | US03/15465 | 791 |
| 925 | 2300-18178WO | US03/15465 | 792 |
| 926 | 2300-18178WO | US03/15465 | 793 |
| 927 | 2300-18178WO | US03/15465 | 794 |
| 928 | 2300-18178WO | US03/15465 | 795 |
| 929 | 2300-18178WO | US03/15465 | 796 |
| 930 | 2300-18178WO | US03/15465 | 797 |
| 931 | 2300-18178WO | US03/15465 | 798 |
| 932 | 2300-18178WO | US03/15465 | 799 |
| 933 | 2300-18178WO | US03/15465 | 800 |
| 934 | 2300-18178WO | US03/15465 | 801 |
| 935 | 2300-18178WO | US03/15465 | 802 |
| 936 | 2300-18178WO | US03/15465 | 803 |
| 937 | 2300-18178WO | US03/15465 | 804 |
| 938 | 2300-18178WO | US03/15465 | 805 |
| 939 | 2300-18178WO | US03/15465 | 806 |
| 940 | 2300-18178WO | US03/15465 | 807 |
| 941 | 2300-18178WO | US03/15465 | 808 |
| 942 | 2300-18178WO | US03/15465 | 809 |
| 943 | 2300-18178WO | US03/15465 | 810 |
| 944 | 2300-18178WO | US03/15465 | 811 |
| 945 | 2300-18178WO | US03/15465 | 812 |
| 946 | 2300-18178WO | US03/15465 | 813 |
| 947 | 2300-18178WO | US03/15465 | 814 |
| 948 | 2300-18178WO | US03/15465 | 815 |
| 949 | 2300-18178WO | US03/15465 | 816 |
| 950 | 2300-18178WO | US03/15465 | 817 |
| 951 | 2300-18178WO | US03/15465 | 818 |
| 952 | 2300-18178WO | US03/15465 | 819 |
| 953 | 2300-18178WO | US03/15465 | 820 |
| 954 | 2300-18178WO | US03/15465 | 821 |
| 955 | 2300-18178WO | US03/15465 | 822 |
| 956 | 2300-18178WO | US03/15465 | 823 |
| 957 | 2300-18178WO | US03/15465 | 824 |
| 958 | 2300-18178WO | US03/15465 | 825 |
| 959 | 2300-18178WO | US03/15465 | 826 |
| 960 | 2300-18178WO | US03/15465 | 827 |
| 961 | 2300-18178WO | US03/15465 | 828 |
| 962 | 2300-18178WO | US03/15465 | 829 |
| 963 | 2300-18178WO | US03/15465 | 830 |
| 964 | 2300-18178WO | US03/15465 | 831 |
| 965 | 2300-18178WO | US03/15465 | 832 |
| 966 | 2300-18178WO | US03/15465 | 833 |
| 967 | 2300-18178WO | US03/15465 | 834 |
| 968 | 2300-18178WO | US03/15465 | 835 |
| 969 | 2300-18178WO | US03/15465 | 836 |
| 970 | 2300-18178WO | US03/15465 | 837 |
| 971 | 2300-18178WO | US03/15465 | 838 |
| 972 | 2300-18178WO | US03/15465 | 839 |
| 973 | 2300-18178WO | US03/15465 | 840 |
| 974 | 2300-18178WO | US03/15465 | 841 |
| 975 | 2300-18178WO | US03/15465 | 842 |
| 976 | 2300-18178WO | US03/15465 | 843 |
| 977 | 2300-18178WO | US03/15465 | 844 |
| 978 | 2300-18178WO | US03/15465 | 845 |
| 979 | 2300-18178WO | US03/15465 | 846 |
| 980 | 2300-18178WO | US03/15465 | 847 |
| 981 | 2300-18178WO | US03/15465 | 848 |
| 982 | 2300-18178WO | US03/15465 | 849 |
| 983 | 2300-18178WO | US03/15465 | 850 |
| 984 | 2300-18178WO | US03/15465 | 851 |
| 985 | 2300-18178WO | US03/15465 | 852 |
| 986 | 2300-18178WO | US03/15465 | 853 |
| 987 | 2300-18178WO | US03/15465 | 854 |
| 988 | 2300-18178WO | US03/15465 | 855 |
| 989 | 2300-18178WO | US03/15465 | 856 |
| 990 | 2300-18178WO | US03/15465 | 857 |
| 991 | 2300-18178WO | US03/15465 | 858 |
| 992 | 2300-18178WO | US03/15465 | 859 |
| 993 | 2300-18178WO | US03/15465 | 860 |
| 994 | 2300-18178WO | US03/15465 | 861 |
| 995 | 2300-18178WO | US03/15465 | 862 |
| 996 | 2300-18178WO | US03/15465 | 863 |
| 997 | 2300-18178WO | US03/15465 | 864 |
| 998 | 2300-18178WO | US03/15465 | 865 |
| 999 | 2300-18178WO | US03/15465 | 866 |
| 1000 | 2300-18178WO | US03/15465 | 867 |
| 1001 | 2300-18178WO | US03/15465 | 868 |
| 1002 | 2300-18178WO | US03/15465 | 869 |
| 1003 | 2300-18178WO | US03/15465 | 870 |
| 1004 | 2300-18178WO | US03/15465 | 871 |
| 1005 | 2300-18178WO | US03/15465 | 872 |
| 1006 | 2300-18178WO | US03/15465 | 873 |
| 1007 | 2300-18178WO | US03/15465 | 874 |
| 1008 | 2300-18178WO | US03/15465 | 875 |
| 1009 | 2300-18178WO | US03/15465 | 876 |
| 1010 | 2300-18178WO | US03/15465 | 877 |
| 1011 | 2300-18178WO | US03/15465 | 878 |
| 1012 | 2300-18178WO | US03/15465 | 879 |
| 1013 | 2300-18178WO | US03/15465 | 880 |
| 1014 | 2300-18178WO | US03/15465 | 881 |
| 1015 | 2300-18178WO | US03/15465 | 882 |
| 1016 | 2300-18178WO | US03/15465 | 883 |
| 1017 | 2300-18178WO | US03/15465 | 884 |
| 1018 | 2300-18178WO | US03/15465 | 885 |
| 1019 | 2300-18178WO | US03/15465 | 886 |
| 1020 | 2300-18178WO | US03/15465 | 887 |
| 1021 | 2300-18178WO | US03/15465 | 888 |
| 1022 | 2300-18178WO | US03/15465 | 889 |
| 1023 | 2300-18178WO | US03/15465 | 890 |
| 1024 | 2300-18178WO | US03/15465 | 891 |
| 1025 | 2300-18178WO | US03/15465 | 892 |
| 1026 | 2300-18178WO | US03/15465 | 893 |
| 1027 | 2300-18178WO | US03/15465 | 894 |
| 1028 | 2300-18178WO | US03/15465 | 895 |
| 1029 | 2300-18178WO | US03/15465 | 896 |
| 1030 | 2300-18178WO | US03/15465 | 897 |
| 1031 | 2300-18178WO | US03/15465 | 898 |
| 1032 | 2300-18178WO | US03/15465 | 899 |
| 1033 | 2300-18178WO | US03/15465 | 900 |
| 1034 | 2300-18178WO | US03/15465 | 901 |
| 1035 | 2300-18178WO | US03/15465 | 902 |
| 1036 | 2300-18178WO | US03/15465 | 903 |
| 1037 | 2300-18178WO | US03/15465 | 904 |
| 1038 | 2300-18178WO | US03/15465 | 905 |
| 1039 | 2300-18178WO | US03/15465 | 906 |
| 1040 | 2300-18178WO | US03/15465 | 907 |
| 1041 | 2300-18178WO | US03/15465 | 908 |
| 1042 | 2300-18178WO | US03/15465 | 909 |
| 1043 | 2300-18178WO | US03/15465 | 910 |
| 1044 | 2300-18178WO | US03/15465 | 911 |
| 1045 | 2300-18178WO | US03/15465 | 912 |
| 1046 | 2300-18178WO | US03/15465 | 913 |
| 1047 | 2300-18178WO | US03/15465 | 914 |
| 1048 | 2300-18178WO | US03/15465 | 915 |
| 1049 | 2300-18178WO | US03/15465 | 916 |
| 1050 | 2300-18178WO | US03/15465 | 917 |
| 1051 | 2300-18178WO | US03/15465 | 918 |
| 1052 | 2300-18178WO | US03/15465 | 919 |
| 1053 | 2300-18178WO | US03/15465 | 920 |
| 1054 | 2300-18178WO | US03/15465 | 921 |
| 1055 | 2300-18178WO | US03/15465 | 922 |
| 1056 | 2300-18178WO | US03/15465 | 923 |
| 1057 | 2300-18178WO | US03/15465 | 924 |
| 1058 | 2300-18178WO | US03/15465 | 925 |
| 1059 | 2300-18178WO | US03/15465 | 926 |
| 1060 | 2300-18178WO | US03/15465 | 927 |
| 1061 | 2300-18178WO | US03/15465 | 928 |
| 1062 | 2300-18178WO | US03/15465 | 929 |
| 1063 | 2300-18178WO | US03/15465 | 930 |
| 1064 | 2300-18178WO | US03/15465 | 931 |
| 1065 | 2300-18178WO | US03/15465 | 932 |
| 1066 | 2300-18178WO | US03/15465 | 933 |
| 1067 | 2300-18178WO | US03/15465 | 934 |
| 1068 | 2300-18178WO | US03/15465 | 935 |
| 1069 | 2300-18178WO | US03/15465 | 936 |
| 1070 | 2300-18178WO | US03/15465 | 937 |
| 1071 | 2300-18178WO | US03/15465 | 938 |
| 1072 | 2300-18178WO | US03/15465 | 939 |
| 1073 | 2300-18178WO | US03/15465 | 940 |
| 1074 | 2300-18178WO | US03/15465 | 941 |
| 1075 | 2300-18178WO | US03/15465 | 942 |
| 1076 | 2300-18178WO | US03/15465 | 943 |
| 1077 | 2300-18178WO | US03/15465 | 944 |
| 1078 | 2300-18178WO | US03/15465 | 945 |
| 1079 | 2300-18178WO | US03/15465 | 946 |
| 1080 | 2300-18178WO | US03/15465 | 947 |
| 1081 | 2300-18178WO | US03/15465 | 948 |
| 1082 | 2300-18178WO | US03/15465 | 949 |
| 1083 | 2300-18178WO | US03/15465 | 950 |
| 1084 | 2300-18178WO | US03/15465 | 951 |
| 1085 | 2300-18178WO | US03/15465 | 952 |
| 1086 | 2300-18178WO | US03/15465 | 953 |
| 1087 | 2300-18178WO | US03/15465 | 954 |
| 1088 | 2300-18178WO | US03/15465 | 955 |
| 1089 | 2300-18178WO | US03/15465 | 956 |
| 1090 | 2300-18178WO | US03/15465 | 957 |
| 1091 | 2300-18178WO | US03/15465 | 958 |
| 1092 | 2300-18178WO | US03/15465 | 959 |
| 1093 | 2300-18178WO | US03/15465 | 960 |
| 1094 | 2300-18178WO | US03/15465 | 961 |
| 1095 | 2300-18178WO | US03/15465 | 962 |
| 1096 | 2300-18178WO | US03/15465 | 963 |
| 1097 | 2300-18178WO | US03/15465 | 964 |
| 1098 | 2300-18178WO | US03/15465 | 965 |
| 1099 | 2300-18178WO | US03/15465 | 966 |
| 1100 | 2300-18178WO | US03/15465 | 967 |
| 1101 | 2300-18178WO | US03/15465 | 968 |
| 1102 | 2300-18178WO | US03/15465 | 969 |
| 1103 | 2300-18178WO | US03/15465 | 970 |
| 1104 | 2300-18178WO | US03/15465 | 971 |
| 1105 | 2300-18178WO | US03/15465 | 972 |
| 1106 | 2300-18178WO | US03/15465 | 973 |
| 1107 | 2300-18178WO | US03/15465 | 974 |
| 1108 | 2300-18178WO | US03/15465 | 975 |
| 1109 | 2300-18178WO | US03/15465 | 976 |
| 1110 | 2300-18178WO | US03/15465 | 977 |
| 1111 | 2300-18178WO | US03/15465 | 978 |
| 1112 | 2300-18178WO | US03/15465 | 979 |
| 1113 | 2300-18178WO | US03/15465 | 980 |
| 1114 | 2300-18178WO | US03/15465 | 981 |
| 1115 | 2300-18178WO | US03/15465 | 982 |
| 1116 | 2300-18178WO | US03/15465 | 983 |
| 1117 | 2300-18178WO | US03/15465 | 984 |
| 1118 | 2300-18178WO | US03/15465 | 985 |
| 1119 | 2300-18178WO | US03/15465 | 986 |
| 1120 | 2300-18178WO | US03/15465 | 987 |
| 1121 | 2300-18178WO | US03/15465 | 988 |
| 1122 | 2300-18178WO | US03/15465 | 989 |
| 1123 | 2300-18178WO | US03/15465 | 990 |
| 1124 | 2300-18178WO | US03/15465 | 991 |
| 1125 | 2300-18178WO | US03/15465 | 992 |
| 1126 | 2300-18178WO | US03/15465 | 993 |
| 1127 | 2300-18178WO | US03/15465 | 994 |
| 1128 | 2300-18178WO | US03/15465 | 995 |
| 1129 | 2300-18178WO | US03/15465 | 996 |
| 1130 | 2300-18178WO | US03/15465 | 997 |
| 1131 | 2300-18178WO | US03/15465 | 998 |
| 1132 | 2300-18178WO | US03/15465 | 999 |
| 1133 | 2300-18178WO | US03/15465 | 1000 |
| 1134 | 2300-18178WO | US03/15465 | 1001 |
| 1135 | 2300-18178WO | US03/15465 | 1002 |
| 1136 | 2300-18178WO | US03/15465 | 1003 |
| 1137 | 2300-18178WO | US03/15465 | 1004 |
| 1138 | 2300-18178WO | US03/15465 | 1005 |
| 1139 | 2300-18178WO | US03/15465 | 1006 |
| 1140 | 2300-18178WO | US03/15465 | 1007 |
| 1141 | 2300-18178WO | US03/15465 | 1008 |
| 1142 | 2300-18178WO | US03/15465 | 1009 |
| 1143 | 2300-18178WO | US03/15465 | 1010 |
| 1144 | 2300-18178WO | US03/15465 | 1011 |
| 1145 | 2300-18178WO | US03/15465 | 1012 |
| 1146 | 2300-18178WO | US03/15465 | 1013 |
| 1147 | 2300-18178WO | US03/15465 | 1014 |
| 1148 | 2300-18178WO | US03/15465 | 1015 |
| 1149 | 2300-18178WO | US03/15465 | 1016 |
| 1150 | 2300-18178WO | US03/15465 | 1017 |
| 1151 | 2300-18178WO | US03/15465 | 1018 |
| 1152 | 2300-18178WO | US03/15465 | 1019 |
| 1153 | 2300-18178WO | US03/15465 | 1020 |
| 1154 | 2300-18178WO | US03/15465 | 1021 |
| 1155 | 2300-18178WO | US03/15465 | 1022 |
| 1156 | 2300-18178WO | US03/15465 | 1023 |
| 1157 | 2300-18178WO | US03/15465 | 1024 |
| 1158 | 2300-18178WO | US03/15465 | 1025 |
| 1159 | 2300-18178WO | US03/15465 | 1026 |
| 1160 | 2300-18178WO | US03/15465 | 1027 |
| 1161 | 2300-18178WO | US03/15465 | 1028 |
| 1162 | 2300-18178WO | US03/15465 | 1029 |
| 1163 | 2300-18178WO | US03/15465 | 1030 |
| 1164 | 2300-18178WO | US03/15465 | 1031 |
| 1165 | 2300-18178WO | US03/15465 | 1032 |
| 1166 | 2300-18178WO | US03/15465 | 1033 |
| 1167 | 2300-18178WO | US03/15465 | 1034 |
| 1168 | 2300-18178WO | US03/15465 | 1035 |
| 1169 | 2300-18178WO | US03/15465 | 1036 |
| 1170 | 2300-18178WO | US03/15465 | 1037 |
| 1171 | 2300-18178WO | US03/15465 | 1038 |
| 1172 | 2300-18178WO | US03/15465 | 1039 |
| 1173 | 2300-18178WO | US03/15465 | 1040 |
| 1174 | 2300-18178WO | US03/15465 | 1041 |
| 1175 | 2300-18178WO | US03/15465 | 1042 |
| 1176 | 2300-18178WO | US03/15465 | 1043 |
| 1177 | 2300-18178WO | US03/15465 | 1044 |
| 1178 | 2300-18178WO | US03/15465 | 1045 |
| 1179 | 2300-18178WO | US03/15465 | 1046 |
| 1180 | 2300-18178WO | US03/15465 | 1047 |
| 1181 | 2300-18178WO | US03/15465 | 1048 |
| 1182 | 2300-18178WO | US03/15465 | 1049 |
| 1183 | 2300-18178WO | US03/15465 | 1050 |
| 1184 | 2300-18178WO | US03/15465 | 1051 |
| 1185 | 2300-18178WO | US03/15465 | 1052 |
| 1186 | 2300-18178WO | US03/15465 | 1053 |
| 1187 | 2300-18178WO | US03/15465 | 1054 |
| 1188 | 2300-18178WO | US03/15465 | 1055 |
| 1189 | 2300-18178WO | US03/15465 | 1056 |
| 1190 | 2300-18178WO | US03/15465 | 1057 |
| 1191 | 2300-18178WO | US03/15465 | 1058 |
| 1192 | 2300-18178WO | US03/15465 | 1059 |
| 1193 | 2300-18178WO | US03/15465 | 1060 |
| 1194 | 2300-18178WO | US03/15465 | 1061 |
| 1195 | 2300-18178WO | US03/15465 | 1062 |
| 1196 | 2300-18178WO | US03/15465 | 1063 |
| 1197 | 2300-18178WO | US03/15465 | 1064 |
| 1198 | 2300-18178WO | US03/15465 | 1065 |
| 1199 | 2300-18178WO | US03/15465 | 1066 |
| 1200 | 2300-18178WO | US03/15465 | 1067 |
| 1201 | 2300-18178WO | US03/15465 | 1068 |
| 1202 | 2300-18178WO | US03/15465 | 1069 |
| 1203 | 2300-18178WO | US03/15465 | 1070 |
| 1204 | 2300-18178WO | US03/15465 | 1071 |
| 1205 | 2300-18178WO | US03/15465 | 1072 |
| 1206 | 2300-18178WO | US03/15465 | 1073 |
| 1207 | 2300-18178WO | US03/15465 | 1074 |
| 1208 | 2300-18178WO | US03/15465 | 1075 |
| 1209 | 2300-18178WO | US03/15465 | 1076 |
| 1210 | 2300-18178WO | US03/15465 | 1077 |
| 1211 | 2300-18178WO | US03/15465 | 1078 |
| 1212 | 2300-18178WO | US03/15465 | 1079 |
| 1213 | 2300-18178WO | US03/15465 | 1080 |
| 1214 | 2300-18178WO | US03/15465 | 1081 |
| 1215 | 2300-18178WO | US03/15465 | 1082 |
| 1216 | 2300-18178WO | US03/15465 | 1083 |
| 1217 | 2300-18178WO | US03/15465 | 1084 |
| 1218 | 2300-18178WO | US03/15465 | 1085 |
| 1219 | 2300-18178WO | US03/15465 | 1086 |
| 1220 | 2300-18178WO | US03/15465 | 1087 |
| 1221 | 2300-18178WO | US03/15465 | 1088 |
| 1222 | 2300-18178WO | US03/15465 | 1089 |
| 1223 | 2300-18178WO | US03/15465 | 1090 |
| 1224 | 2300-18178WO | US03/15465 | 1091 |
| 1225 | 2300-18178WO | US03/15465 | 1092 |
| 1226 | 2300-18178WO | US03/15465 | 1093 |
| 1227 | 2300-18178WO | US03/15465 | 1094 |
| 1228 | 2300-18178WO | US03/15465 | 1095 |
| 1229 | 2300-18178WO | US03/15465 | 1096 |
| 1230 | 2300-18178WO | US03/15465 | 1097 |
| 1231 | 2300-18178WO | US03/15465 | 1098 |
| 1232 | 2300-18178WO | US03/15465 | 1099 |
| 1233 | 2300-18178WO | US03/15465 | 1100 |
| 1234 | 2300-18178WO | US03/15465 | 1101 |
| 1235 | 2300-18178WO | US03/15465 | 1102 |
| 1236 | 2300-18178WO | US03/15465 | 1103 |
| 1237 | 2300-18178WO | US03/15465 | 1104 |
| 1238 | 2300-18178WO | US03/15465 | 1105 |
| 1239 | 2300-18178WO | US03/15465 | 1106 |
| 1240 | 2300-18178WO | US03/15465 | 1107 |
| 1241 | 2300-18178WO | US03/15465 | 1108 |
| 1242 | 2300-18178WO | US03/15465 | 1109 |
| 1243 | 2300-18178WO | US03/15465 | 1110 |
| 1244 | 2300-18178WO | US03/15465 | 1111 |
| 1245 | 2300-18178WO | US03/15465 | 1112 |
| 1246 | 2300-18178WO | US03/15465 | 1113 |
| 1247 | 2300-18178WO | US03/15465 | 1114 |
| 1248 | 2300-18178WO | US03/15465 | 1115 |
| 1249 | 2300-18178WO | US03/15465 | 1116 |
| 1250 | 2300-18178WO | US03/15465 | 1117 |
| 1251 | 2300-18178WO | US03/15465 | 1118 |
| 1252 | 2300-18178WO | US03/15465 | 1119 |
| 1253 | 2300-18178WO | US03/15465 | 1120 |
| 1254 | 2300-18178WO | US03/15465 | 1121 |
| 1255 | 2300-18178WO | US03/15465 | 1122 |
| 1256 | 2300-18178WO | US03/15465 | 1123 |
| 1257 | 2300-18178WO | US03/15465 | 1124 |
| 1258 | 2300-18178WO | US03/15465 | 1125 |
| 1259 | 2300-18178WO | US03/15465 | 1126 |
| 1260 | 2300-18178WO | US03/15465 | 1127 |
| 1261 | 2300-18178WO | US03/15465 | 1128 |
| 1262 | 2300-18178WO | US03/15465 | 1129 |
| 1263 | 2300-18178WO | US03/15465 | 1130 |
| 1264 | 2300-18178WO | US03/15465 | 1131 |
| 1265 | 2300-18178WO | US03/15465 | 1132 |
| 1266 | 2300-18178WO | US03/15465 | 1133 |
| 1267 | 2300-18178WO | US03/15465 | 1134 |
| 1268 | 2300-18178WO | US03/15465 | 1135 |
| 1269 | 2300-18178WO | US03/15465 | 1136 |
| 1270 | 2300-18178WO | US03/15465 | 1137 |
| 1271 | 2300-18178WO | US03/15465 | 1138 |
| 1272 | 2300-18178WO | US03/15465 | 1139 |
| 1273 | 2300-18178WO | US03/15465 | 1140 |
| 1274 | 2300-18178WO | US03/15465 | 1141 |
| 1275 | 2300-18178WO | US03/15465 | 1142 |
| 1276 | 2300-18178WO | US03/15465 | 1143 |
| 1277 | 2300-18178WO | US03/15465 | 1144 |
| 1278 | 2300-18178WO | US03/15465 | 1145 |
| 1279 | 2300-18178WO | US03/15465 | 1146 |
| 1280 | 2300-18178WO | US03/15465 | 1147 |
| 1281 | 2300-18178WO | US03/15465 | 1148 |
| 1282 | 2300-18178WO | US03/15465 | 1149 |
| 1283 | 2300-18178WO | US03/15465 | 1150 |
| 1284 | 2300-18178WO | US03/15465 | 1151 |
| 1285 | 2300-18178WO | US03/15465 | 1152 |
| 1286 | 2300-18178WO | US03/15465 | 1153 |
| 1287 | 2300-18178WO | US03/15465 | 1154 |
| 1288 | 2300-18178WO | US03/15465 | 1155 |
| 1289 | 2300-18178WO | US03/15465 | 1156 |
| 1290 | 2300-18178WO | US03/15465 | 1157 |
| 1291 | 2300-18178WO | US03/15465 | 1158 |
| 1292 | 2300-18178WO | US03/15465 | 1159 |
| 1293 | 2300-18178WO | US03/15465 | 1160 |
| 1294 | 2300-18178WO | US03/15465 | 1161 |
| 1295 | 2300-18178WO | US03/15465 | 1162 |
| 1296 | 2300-18178WO | US03/15465 | 1163 |
| 1297 | 2300-18178WO | US03/15465 | 1164 |
| 1298 | 2300-18178WO | US03/15465 | 1165 |
| 1299 | 2300-18178WO | US03/15465 | 1166 |
| 1300 | 2300-18178WO | US03/15465 | 1167 |
| 1301 | 2300-18178WO | US03/15465 | 1168 |
| 1302 | 2300-18178WO | US03/15465 | 1169 |
| 1303 | 2300-18178WO | US03/15465 | 1170 |
| 1304 | 2300-18178WO | US03/15465 | 1171 |
| 1305 | 2300-18178WO | US03/15465 | 1172 |
| 1306 | 2300-18178WO | US03/15465 | 1173 |
| 1307 | 2300-18178WO | US03/15465 | 1174 |
| 1308 | 2300-18178WO | US03/15465 | 1175 |
| 1309 | 2300-18178WO | US03/15465 | 1176 |
| 1310 | 2300-18178WO | US03/15465 | 1177 |
| 1311 | 2300-18178WO | US03/15465 | 1178 |
| 1312 | 2300-18178WO | US03/15465 | 1179 |
| 1313 | 2300-18178WO | US03/15465 | 1180 |
| 1314 | 2300-18178WO | US03/15465 | 1181 |
| 1315 | 2300-18178WO | US03/15465 | 1182 |
| 1316 | 2300-18178WO | US03/15465 | 1183 |
| 1317 | 2300-18178WO | US03/15465 | 1184 |
| 1318 | 2300-18178WO | US03/15465 | 1185 |
| 1319 | 2300-18178WO | US03/15465 | 1186 |
| 1320 | 2300-18178WO | US03/15465 | 1187 |
| 1321 | 2300-18178WO | US03/15465 | 1188 |
| 1322 | 2300-18178WO | US03/15465 | 1189 |
| 1323 | 2300-18178WO | US03/15465 | 1190 |
| 1324 | 2300-18178WO | US03/15465 | 1191 |
| 1325 | 2300-18178WO | US03/15465 | 1192 |
| 1326 | 2300-18178WO | US03/15465 | 1193 |
| 1327 | 2300-18178WO | US03/15465 | 1194 |
| 1328 | 2300-18178WO | US03/15465 | 1195 |
| 1329 | 2300-18178WO | US03/15465 | 1196 |
| 1330 | 2300-18178WO | US03/15465 | 1197 |
| 1331 | 2300-18178WO | US03/15465 | 1198 |
| 1332 | 2300-18178WO | US03/15465 | 1199 |
| 1333 | 2300-18178WO | US03/15465 | 1200 |
| 1334 | 2300-18178WO | US03/15465 | 1201 |
| 1335 | 2300-18178WO | US03/15465 | 1202 |
| 1336 | 2300-18178WO | US03/15465 | 1203 |
| 1337 | 2300-18178WO | US03/15465 | 1204 |
| 1338 | 2300-18178WO | US03/15465 | 1205 |
| 1339 | 2300-18178WO | US03/15465 | 1206 |
| 1340 | 2300-18178WO | US03/15465 | 1207 |
| 1341 | 2300-18178WO | US03/15465 | 1208 |
| 1342 | 2300-18178WO | US03/15465 | 1209 |
| 1343 | 2300-18178WO | US03/15465 | 1210 |
| 1344 | 2300-18178WO | US03/15465 | 1211 |
| 1345 | 2300-18178WO | US03/15465 | 1212 |
| 1346 | 2300-18178WO | US03/15465 | 1213 |
| 1347 | 2300-18178WO | US03/15465 | 1214 |
| 1348 | 2300-18178WO | US03/15465 | 1215 |
| 1349 | 2300-18178WO | US03/15465 | 1216 |
| 1350 | 2300-18178WO | US03/15465 | 1217 |
| 1351 | 2300-18178WO | US03/15465 | 1218 |
| 1352 | 2300-18178WO | US03/15465 | 1219 |
| 1353 | 2300-18178WO | US03/15465 | 1220 |
| 1354 | 2300-18178WO | US03/15465 | 1221 |
| 1355 | 2300-18178WO | US03/15465 | 1222 |
| 1356 | 2300-18178WO | US03/15465 | 1223 |
| 1357 | 2300-18178WO | US03/15465 | 1224 |
| 1358 | 2300-18178WO | US03/15465 | 1225 |
| 1359 | 2300-18178WO | US03/15465 | 1226 |
| 1360 | 2300-18178WO | US03/15465 | 1227 |
| 1361 | 2300-18178WO | US03/15465 | 1228 |
| 1362 | 2300-18178WO | US03/15465 | 1229 |
| 1363 | 2300-18178WO | US03/15465 | 1230 |
| 1364 | 2300-18178WO | US03/15465 | 1231 |
| 1365 | 2300-18178WO | US03/15465 | 1232 |
| 1366 | 2300-18178WO | US03/15465 | 1233 |
| 1367 | 2300-18178WO | US03/15465 | 1234 |
| 1368 | 2300-18178WO | US03/15465 | 1235 |
| 1369 | 2300-18178WO | US03/15465 | 1236 |
| 1370 | 2300-18178WO | US03/15465 | 1237 |
| 1371 | 2300-18178WO | US03/15465 | 1238 |
| 1372 | 2300-18178WO | US03/15465 | 1239 |
| 1373 | 2300-18178WO | US03/15465 | 1240 |
| 1374 | 2300-18178WO | US03/15465 | 1241 |
| 1375 | 2300-18178WO | US03/15465 | 1242 |
| 1376 | 2300-18178WO | US03/15465 | 1243 |
| 1377 | 2300-18178WO | US03/15465 | 1244 |
| 1378 | 2300-18178WO | US03/15465 | 1245 |
| 1379 | 2300-18178WO | US03/15465 | 1246 |
| 1380 | 2300-18178WO | US03/15465 | 1247 |
| 1381 | 2300-18178WO | US03/15465 | 1248 |
| 1382 | 2300-18178WO | US03/15465 | 1249 |
| 1383 | 2300-18178WO | US03/15465 | 1250 |
| 1384 | 2300-18178WO | US03/15465 | 1251 |
| 1385 | 2300-18178WO | US03/15465 | 1252 |
| 1386 | 2300-18178WO | US03/15465 | 1253 |
| 1387 | 2300-18178WO | US03/15465 | 1254 |
| 1388 | 2300-18178WO | US03/15465 | 1255 |
| 1389 | 2300-18178WO | US03/15465 | 1256 |
| 1390 | 2300-18178WO | US03/15465 | 1257 |
| 1391 | 2300-18178WO | US03/15465 | 1258 |
| 1392 | 2300-18178WO | US03/15465 | 1259 |
| 1393 | 2300-18178WO | US03/15465 | 1260 |
| 1394 | 2300-18178WO | US03/15465 | 1261 |
| 1395 | 2300-18178WO | US03/15465 | 1262 |
| 1396 | 2300-18178WO | US03/15465 | 1263 |
| 1397 | 2300-18178WO | US03/15465 | 1264 |
| 1398 | 2300-18178WO | US03/15465 | 1265 |
| 1399 | 2300-18178WO | US03/15465 | 1266 |
| 1400 | 2300-18178WO | US03/15465 | 1267 |
| 1401 | 2300-18178WO | US03/15465 | 1268 |
| 1402 | 2300-18178WO | US03/15465 | 1269 |
| 1403 | 2300-18178WO | US03/15465 | 1270 |
| 1404 | 2300-18178WO | US03/15465 | 1271 |
| 1405 | 2300-18178WO | US03/15465 | 1272 |
| 1406 | 2300-18178WO | US03/15465 | 1273 |
| 1407 | 2300-18178WO | US03/15465 | 1274 |
| 1408 | 2300-18178WO | US03/15465 | 1275 |
| 1409 | 2300-18178WO | US03/15465 | 1276 |
| 1410 | 2300-18178WO | US03/15465 | 1277 |
| 1411 | 2300-18178WO | US03/15465 | 1278 |
| 1412 | 2300-18178WO | US03/15465 | 1279 |
| 1413 | 2300-18178WO | US03/15465 | 1280 |
| 1414 | 2300-18178WO | US03/15465 | 1281 |
| 1415 | 2300-18178WO | US03/15465 | 1282 |
| 1416 | 2300-18178WO | US03/15465 | 1283 |
| 1417 | 2300-18178WO | US03/15465 | 1284 |
| 1418 | 2300-18178WO | US03/15465 | 1285 |
| 1419 | 2300-18178WO | US03/15465 | 1286 |
| 1420 | 2300-18178WO | US03/15465 | 1287 |
| 1421 | 2300-18178WO | US03/15465 | 1288 |
| 1422 | 2300-18178WO | US03/15465 | 1289 |
| 1423 | 2300-18178WO | US03/15465 | 1290 |
| 1424 | 2300-18178WO | US03/15465 | 1291 |
| 1425 | 2300-18178WO | US03/15465 | 1292 |
| 1426 | 2300-18178WO | US03/15465 | 1293 |
| 1427 | 2300-18178WO | US03/15465 | 1294 |
| 1428 | 2300-18178WO | US03/15465 | 1295 |
| 1429 | 2300-18178WO | US03/15465 | 1296 |
| 1430 | 2300-18178WO | US03/15465 | 1297 |
| 1431 | 2300-18178WO | US03/15465 | 1298 |
| 1432 | 2300-18178WO | US03/15465 | 1299 |
| 1433 | 2300-18178WO | US03/15465 | 1300 |
| 1434 | 2300-18178WO | US03/15465 | 1301 |
| 1435 | 2300-18178WO | US03/15465 | 1302 |
| 1436 | 2300-18178WO | US03/15465 | 1303 |
| 1437 | 2300-18178WO | US03/15465 | 1304 |
| 1438 | 2300-18178WO | US03/15465 | 1305 |
| 1439 | 2300-18178WO | US03/15465 | 1306 |
| 1440 | 2300-18178WO | US03/15465 | 1307 |
| 1441 | 2300-18178WO | US03/15465 | 1308 |
| 1442 | 2300-18178WO | US03/15465 | 1309 |
| 1443 | 2300-18178WO | US03/15465 | 1310 |
| 1444 | 2300-18178WO | US03/15465 | 1311 |
| 1445 | 2300-18178WO | US03/15465 | 1312 |
| 1446 | 2300-18178WO | US03/15465 | 1313 |
| 1447 | 2300-18178WO | US03/15465 | 1314 |
| 1448 | 2300-18178WO | US03/15465 | 1315 |
| 1449 | 2300-18178WO | US03/15465 | 1316 |
| 1450 | 2300-18178WO | US03/15465 | 1317 |
| 1451 | 2300-18178WO | US03/15465 | 1318 |
| 1452 | 2300-18178WO | US03/15465 | 1319 |
| 1453 | 2300-18178WO | US03/15465 | 1320 |
| 1454 | 2300-18178WO | US03/15465 | 1321 |
| 1455 | 2300-18178WO | US03/15465 | 1322 |
| 1456 | 2300-18178WO | US03/15465 | 1323 |
| 1457 | 2300-18178WO | US03/15465 | 1324 |
| 1458 | 2300-18178WO | US03/15465 | 1325 |
| 1459 | 2300-18178WO | US03/15465 | 1326 |
| 1460 | 2300-18178WO | US03/15465 | 1327 |
| 1461 | 2300-18178WO | US03/15465 | 1328 |
| 1462 | 2300-18178WO | US03/15465 | 1329 |
| 1463 | 2300-18178WO | US03/15465 | 1330 |
| 1464 | 2300-18178WO | US03/15465 | 1331 |
| 1465 | 2300-18178WO | US03/15465 | 1332 |
| 1466 | 2300-18178WO | US03/15465 | 1333 |
| 1467 | 2300-18178WO | US03/15465 | 1334 |
| 1468 | 2300-18178WO | US03/15465 | 1335 |
| 1469 | 2300-18178WO | US03/15465 | 1336 |
| 1470 | 2300-18178WO | US03/15465 | 1337 |
| 1471 | 2300-18178WO | US03/15465 | 1338 |
| 1472 | 2300-18178WO | US03/15465 | 1339 |
| 1473 | 2300-18178WO | US03/15465 | 1340 |
| 1474 | 2300-18178WO | US03/15465 | 1341 |
| 1475 | 2300-18178WO | US03/15465 | 1342 |
| 1476 | 2300-18178WO | US03/15465 | 1343 |
| 1477 | 2300-18178WO | US03/15465 | 1344 |
| 1478 | 2300-18178WO | US03/15465 | 1345 |
| 1479 | 2300-18178WO | US03/15465 | 1346 |
| 1480 | 2300-18178WO | US03/15465 | 1347 |
| 1481 | 2300-18178WO | US03/15465 | 1348 |
| 1482 | 2300-18178WO | US03/15465 | 1349 |
| 1483 | 2300-18178WO | US03/15465 | 1350 |
| 1484 | 2300-18178WO | US03/15465 | 1351 |
| 1485 | 2300-18178WO | US03/15465 | 1352 |
| 1486 | 2300-18178WO | US03/15465 | 1353 |
| 1487 | 2300-18178WO | US03/15465 | 1354 |
| 1488 | 2300-18178WO | US03/15465 | 1355 |
| 1489 | 2300-18178WO | US03/15465 | 1356 |
| 1490 | 2300-18178WO | US03/15465 | 1357 |
| 1491 | 2300-18178WO | US03/15465 | 1358 |
| 1492 | 2300-18178WO | US03/15465 | 1359 |
| 1493 | 2300-18178WO | US03/15465 | 1360 |
| 1494 | 2300-18178WO | US03/15465 | 1361 |
| 1495 | 2300-18178WO | US03/15465 | 1362 |
| 1496 | 2300-18178WO | US03/15465 | 1363 |
| 1497 | 2300-18178WO | US03/15465 | 1364 |
| 1498 | 2300-18178WO | US03/15465 | 1365 |
| 1499 | 2300-18178WO | US03/15465 | 1366 |
| 1500 | 2300-18178WO | US03/15465 | 1367 |
| 1501 | 2300-18178WO | US03/15465 | 1368 |
| 1502 | 2300-18178WO | US03/15465 | 1369 |
| 1503 | 2300-18178WO | US03/15465 | 1370 |
| 1504 | 2300-18178WO | US03/15465 | 1371 |
| 1505 | 2300-18178WO | US03/15465 | 1372 |
| 1506 | 2300-18178WO | US03/15465 | 1373 |
| 1507 | 2300-18178WO | US03/15465 | 1374 |
| 1508 | 2300-18178WO | US03/15465 | 1375 |
| 1509 | 2300-18178WO | US03/15465 | 1376 |
| 1510 | 2300-18178WO | US03/15465 | 1377 |
| 1511 | 2300-18178WO | US03/15465 | 1378 |
| 1512 | 2300-18178WO | US03/15465 | 1379 |
| 1513 | 2300-18178WO | US03/15465 | 1380 |
| 1514 | 2300-18178WO | US03/15465 | 1381 |
| 1515 | 2300-18178WO | US03/15465 | 1382 |
| 1516 | 2300-18178WO | US03/15465 | 1383 |
| 1517 | 2300-18178WO | US03/15465 | 1384 |
| 1518 | 2300-18178WO | US03/15465 | 1385 |
| 1519 | 2300-18178WO | US03/15465 | 1386 |
| 1520 | 2300-18178WO | US03/15465 | 1387 |
| 1521 | 2300-18178WO | US03/15465 | 1388 |
| 1522 | 2300-18178WO | US03/15465 | 1389 |
| 1523 | 2300-18178WO | US03/15465 | 1390 |
| 1524 | 2300-18178WO | US03/15465 | 1391 |
| 1525 | 2300-18178WO | US03/15465 | 1392 |
| 1526 | 2300-18178WO | US03/15465 | 1393 |
| 1527 | 2300-18178WO | US03/15465 | 1394 |
| 1528 | 2300-18178WO | US03/15465 | 1395 |
| 1529 | 2300-18178WO | US03/15465 | 1396 |
| 1530 | 2300-18178WO | US03/15465 | 1397 |
| 1531 | 2300-18178WO | US03/15465 | 1398 |
| 1532 | 2300-18178WO | US03/15465 | 1399 |
| 1533 | 2300-18178WO | US03/15465 | 1400 |
| 1534 | 2300-18178WO | US03/15465 | 1401 |
| 1535 | 2300-18178WO | US03/15465 | 1402 |
| 1536 | 2300-18178WO | US03/15465 | 1403 |
| 1537 | 2300-18178WO | US03/15465 | 1404 |
| 1538 | 2300-18178WO | US03/15465 | 1405 |
| 1539 | 2300-18178WO | US03/15465 | 1406 |
| 1540 | 2300-18178WO | US03/15465 | 1407 |
| 1541 | 2300-18178WO | US03/15465 | 1408 |
| 1542 | 2300-18178WO | US03/15465 | 1409 |
| 1543 | 2300-18178WO | US03/15465 | 1410 |
| 1544 | 2300-18178WO | US03/15465 | 1411 |
| 1545 | 2300-18178WO | US03/15465 | 1412 |
| 1546 | 2300-18178WO | US03/15465 | 1413 |
| 1547 | 2300-18178WO | US03/15465 | 1414 |
| 1548 | 2300-18178WO | US03/15465 | 1415 |
| 1549 | 2300-18178WO | US03/15465 | 1416 |
| 1550 | 2300-18178WO | US03/15465 | 1417 |
| 1551 | 2300-18178WO | US03/15465 | 1418 |
| 1552 | 2300-18178WO | US03/15465 | 1419 |
| 1553 | 2300-18178WO | US03/15465 | 1420 |
| 1554 | 2300-18178WO | US03/15465 | 1421 |
| 1555 | 2300-18178WO | US03/15465 | 1422 |
| 1556 | 2300-18178WO | US03/15465 | 1423 |
| 1557 | 2300-18178WO | US03/15465 | 1424 |
| 1558 | 2300-18178WO | US03/15465 | 1425 |
| 1559 | 2300-18178WO | US03/15465 | 1426 |
| 1560 | 2300-18178WO | US03/15465 | 1427 |
| 1561 | 2300-18178WO | US03/15465 | 1428 |
| 1562 | 2300-18178WO | US03/15465 | 1429 |
| 1563 | 2300-18178WO | US03/15465 | 1430 |
| 1564 | 2300-18178WO | US03/15465 | 1431 |
| 1565 | 2300-18178WO | US03/15465 | 1432 |
| 1566 | 2300-18178WO | US03/15465 | 1433 |
| 1567 | 2300-18178WO | US03/15465 | 1434 |
| 1568 | 2300-18178WO | US03/15465 | 1435 |
| 1569 | 2300-18178WO | US03/15465 | 1436 |
| 1570 | 2300-18178WO | US03/15465 | 1437 |
| 1571 | 2300-18178WO | US03/15465 | 1438 |
| 1572 | 2300-18178WO | US03/15465 | 1439 |
| 1573 | 2300-18178WO | US03/15465 | 1440 |
| 1574 | 2300-18178WO | US03/15465 | 1441 |
| 1575 | 2300-18178WO | US03/15465 | 1442 |
| 1576 | 2300-18178WO | US03/15465 | 1443 |
| 1577 | 2300-18178WO | US03/15465 | 1444 |
| 1578 | 2300-18178WO | US03/15465 | 1445 |
| 1579 | 2300-18178WO | US03/15465 | 1446 |
| 1580 | 2300-18178WO | US03/15465 | 1447 |
| 1581 | 2300-18178WO | US03/15465 | 1448 |
| 1582 | 2300-18178WO | US03/15465 | 1449 |
| 1583 | 2300-18178WO | US03/15465 | 1450 |
| 1584 | 2300-18178WO | US03/15465 | 1451 |
| 1585 | 2300-18178WO | US03/15465 | 1452 |
| 1586 | 2300-18178WO | US03/15465 | 1453 |
| 1587 | 2300-18178WO | US03/15465 | 1454 |
| 1588 | 2300-18178WO | US03/15465 | 1455 |
| 1589 | 2300-18178WO | US03/15465 | 1456 |
| 1590 | 2300-18178WO | US03/15465 | 1457 |
| 1591 | 2300-18178WO | US03/15465 | 1458 |
| 1592 | 2300-18178WO | US03/15465 | 1459 |
| 1593 | 2300-18178WO | US03/15465 | 1460 |
| 1594 | 2300-18178WO | US03/15465 | 1461 |
| 1595 | 2300-18178WO | US03/15465 | 1462 |
| 1596 | 2300-18178WO | US03/15465 | 1463 |
| 1597 | 2300-18178WO | US03/15465 | 1464 |
| 1598 | 2300-18178WO | US03/15465 | 1465 |
| 1599 | 2300-18178WO | US03/15465 | 1466 |
| 1600 | 2300-18178WO | US03/15465 | 1467 |
| 1601 | 2300-18178WO | US03/15465 | 1468 |
| 1602 | 2300-18178WO | US03/15465 | 1469 |
| 1603 | 2300-18178WO | US03/15465 | 1470 |
| 1604 | 2300-18178WO | US03/15465 | 1471 |
| 1605 | 2300-18178WO | US03/15465 | 1472 |
| 1606 | 2300-18178WO | US03/15465 | 1473 |
| 1607 | 2300-18178WO | US03/15465 | 1474 |
| 1608 | 2300-18178WO | US03/15465 | 1475 |
| 1609 | 2300-18178WO | US03/15465 | 1476 |
| 1610 | 2300-18178WO | US03/15465 | 1477 |
| 1611 | 2300-18178WO | US03/15465 | 1478 |
| 1612 | 2300-18178WO | US03/15465 | 1479 |
| 1613 | 2300-18178WO | US03/15465 | 1480 |
| 1614 | 2300-18178WO | US03/15465 | 1481 |
| 1615 | 2300-18178WO | US03/15465 | 1482 |
| 1616 | 2300-18178WO | US03/15465 | 1483 |
| 1617 | 2300-18178WO | US03/15465 | 1484 |
| 1618 | 2300-18178WO | US03/15465 | 1485 |
| 1619 | 2300-18178WO | US03/15465 | 1486 |
| 1620 | 2300-18178WO | US03/15465 | 1487 |
| 1621 | 2300-18178WO | US03/15465 | 1488 |
| 1622 | 2300-18178WO | US03/15465 | 1489 |
| 1623 | 2300-18178WO | US03/15465 | 1490 |
| 1624 | 2300-18178WO | US03/15465 | 1491 |
| 1625 | 2300-18178WO | US03/15465 | 1492 |
| 1626 | 2300-18178WO | US03/15465 | 1493 |
| 1627 | 2300-18178WO | US03/15465 | 1494 |
| 1628 | 2300-18178WO | US03/15465 | 1495 |
| 1629 | 2300-18178WO | US03/15465 | 1496 |
| 1630 | 2300-18178WO | US03/15465 | 1497 |
| 1631 | 2300-18178WO | US03/15465 | 1498 |
| 1632 | 2300-18178WO | US03/15465 | 1499 |
| 1633 | 2300-18178WO | US03/15465 | 1500 |
| 1634 | 2300-18178WO | US03/15465 | 1501 |
| 1635 | 2300-18178WO | US03/15465 | 1502 |
| 1636 | 2300-18178WO | US03/15465 | 1503 |
| 1637 | 2300-18178WO | US03/15465 | 1504 |
| 1638 | 2300-18178WO | US03/15465 | 1505 |
| 1639 | 2300-18178WO | US03/15465 | 1506 |
| 1640 | 2300-18178WO | US03/15465 | 1507 |
| 1641 | 2300-18178WO | US03/15465 | 1508 |
| 1642 | 2300-18178WO | US03/15465 | 1509 |
| 1643 | 2300-18178WO | US03/15465 | 1510 |
| 1644 | 2300-18178WO | US03/15465 | 1511 |
| 1645 | 2300-18178WO | US03/15465 | 1512 |
| 1646 | 2300-18178WO | US03/15465 | 1513 |
| 1647 | 2300-18178WO | US03/15465 | 1514 |
| 1648 | 2300-18178WO | US03/15465 | 1515 |
| 1649 | 2300-18178WO | US03/15465 | 1516 |
| 1650 | 2300-18178WO | US03/15465 | 1517 |
| 1651 | 2300-18178WO | US03/15465 | 1518 |
| 1652 | 2300-18178WO | US03/15465 | 1519 |
| 1653 | 2300-18178WO | US03/15465 | 1520 |
| 1654 | 2300-18178WO | US03/15465 | 1521 |
| 1655 | 2300-18178WO | US03/15465 | 1522 |
| 1656 | 2300-18178WO | US03/15465 | 1523 |
| 1657 | 2300-18178WO | US03/15465 | 1524 |
| 1658 | 2300-18178WO | US03/15465 | 1525 |
| 1659 | 2300-18178WO | US03/15465 | 1526 |
| 1660 | 2300-18178WO | US03/15465 | 1527 |
| 1661 | 2300-18178WO | US03/15465 | 1528 |
| 1662 | 2300-18178WO | US03/15465 | 1529 |
| 1663 | 2300-18178WO | US03/15465 | 1530 |
| 1664 | 2300-18178WO | US03/15465 | 1531 |
| 1665 | 2300-18178WO | US03/15465 | 1532 |
| 1666 | 2300-18178WO | US03/15465 | 1533 |
| 1667 | 2300-18178WO | US03/15465 | 1534 |
| 1668 | 2300-18178WO | US03/15465 | 1535 |
| 1669 | 2300-18178WO | US03/15465 | 1536 |
| 1670 | 2300-18178WO | US03/15465 | 1537 |
| 1671 | 2300-18178WO | US03/15465 | 1538 |
| 1672 | 2300-18178WO | US03/15465 | 1539 |
| 1673 | 2300-18178WO | US03/15465 | 1540 |
| 1674 | 2300-18178WO | US03/15465 | 1541 |
| 1675 | 2300-18178WO | US03/15465 | 1542 |
| 1676 | 2300-18178WO | US03/15465 | 1543 |
| 1677 | 2300-18178WO | US03/15465 | 1544 |
| 1678 | 2300-18178WO | US03/15465 | 1545 |
| 1679 | 2300-18178WO | US03/15465 | 1546 |
| 1680 | 2300-18178WO | US03/15465 | 1547 |
| 1681 | 2300-18178WO | US03/15465 | 1548 |

### EXAMPLES

[0257] The following examples are put forth so as to provide those of ordinary skill in the art with a complete disclosure and description of how to make and use the present invention, and are not intended to limit the scope of what the inventors regard as their invention nor are they intended to represent that the experiments below are all or the only experiments performed. Efforts have been made to ensure accuracy with respect to numbers used (e.g. amounts, temperature, etc.) but some experimental errors and deviations should be accounted for. Unless indicated otherwise, parts are parts by weight, molecular weight is weight average molecular weight, temperature is in degrees Centigrade, and pressure is at or near atmospheric.

### Example 1

### Source of Biological Materials and Overview of Polynucleotides Expressed by the Biological Materials

[0258] In order to identify genes that are differentially expressed in colon cancer, cDNA libraries were prepared from several different cell lines and tissue sources. Table 1 provides a summary of these libraries, including the shortened library name (used hereafter), the mRNA source used to prepared the cDNA library, the “nickname” of the library that is used in the tables below (in quotes), and the approximate number of clones in the library. cDNA libraries were prepared according to methods well known in the art, and the sequences of the cDNA inserts were determined using well known methods.

TABLE 1
Description of cDNA Libraries

| | | Number |
|---|---|---|
| | | of |
| Library | Description | Clones |
| 1 | Human Colon Cell Line Km12 L4: High Metastatic | 308731 |
| | Potential (derived from Km12C) | |
| 2 | Human Colon Cell Line Km12C: Low Metastatic | 284771 |
| | Potential | |
| 3 | Human Breast Cancer Cell Line MDA-MB-231: High | 326937 |
| | Metastatic Potential; micromets in lung | |
| 4 | Human Breast Cancer Cell Line MCF7: Non- | 318979 |
| | Metastatic | |
| 8 | Human Lung Cancer Cell Line MV-522: High | 223620 |
| | Metastatic Potential | |
| 9 | Human Lung Cancer Cell Line UCP-3: Low | 312503 |
| | Metastatic Potential | |
| 12 | Human microvascular endothelial cells (HMEC) - | 41938 |
| | UNTREATED (PCR (OligodT) cDNA library) | |
| 13 | Human microvascular endothelial cells (HMEC) - | 42100 |
| | bFGF TREATED (PCR (OligodT) cDNA library) | |
| 14 | Human microvascular endothelial cells (HMEC) - | 42825 |
| | VEGF TREATED (PCR (OligodT) cDNA library) | |
| 15 | Normal Colon - UC#2 Patient (MICRODISSECTED | 282718 |
| | PCR (OligodT) cDNA library) | |
| 16 | Colon Tumor - UC#2 Patient (MICRODISSECTED | 298829 |
| | PCR (OligodT) cDNA library) | |
| 17 | Liver Metastasis from Colon Tumor of UC#2 Patient | 303462 |
| | (MICRODISSECTED PCR (OligodT) cDNA library) | |
| 18 | Normal Colon - UC#3 Patient (MICRODISSECTED | 36216 |
| | PCR (OligodT) cDNA library) | |
| 19 | Colon Tumor - UC#3 Patient (MICRODISSECTED | 41388 |
| | PCR (OligodT) cDNA library) | |
| 20 | Liver Metastasis from Colon Tumor of UC#3 Patient | 30956 |
| | (MICRODISSECTED PCR (OligodT) cDNA library) | |
| 21 | GRRpz Cells derived from normal prostate epithelium | 164801 |
| 22 | WOca Cells derived from Gleason Grade 4 prostate | 162088 |
| | cancer epithelium | |
| 23 | Normal Lung Epithelium of Patient #1006 | 306198 |
| | (MICRODISSECTED PCR (OligodT) cDNA library) | |
| 24 | Primary tumor, Large Cell Carcinoma of Patient | 309349 |
| | #1006 (MICRODISSECTED PCR (OligodT) cDNA | |
| | library) | |
| 25 | Normal Prostate Epithelium from Patient 1F97-26811 | 279437 |
| 26 | Prostate Cancer Epithelium Gleason 3 + 3 Patient | 269366 |
| | IF97-26811 | |

[0259] The KM12L4 cell line is derived from the KM12C cell line (Morikawa, et al., Cancer Research (1988) 48:6863). The KM12C cell line, which is poorly metastatic (low metastatic) was established in culture from a Dukes' stage B₂ surgical specimen (Morikawa et al. Cancer Res. (1988) 48:6863). The KML4-A is a highly metastatic subline derived from KM12C (Yeatman et al. Nucl. Acids. Res. (1995) 23:4007; Bao-Ling et al. Proc. Annu. Meet. Am. Assoc. Cancer. Res. (1995) 21:3269). The KM12C and KM12C-derived cell lines (e.g., KM12L4, KM12L4-A, etc.) are well-recognized in the art as a model cell line for the study of colon cancer (see, e.g., Moriakawa et al., supra; Radinsky et al. Clin. Cancer Res. (1995) 1:19; Yeatman et al., (1995) supra; Yeatman et al. Clin. Exp. Metastasis (1996) 14:246).

[0260] The MDA-MB-231 cell line was originally isolated from pleural effusions (Cailleau, J. Natl. Cancer. Inst. (1974) 53:661), is of high metastatic potential, and forms poorly differentiated adenocarcinoma grade II in nude mice consistent with breast carcinoma. The MCF7 cell line was derived from a pleural effusion of a breast adenocarcinoma and is non-metastatic. These cell lines are well-recognized in the art as models for the study of human breast and lung cancer (see, e.g., Chandrasekaran et al., Cancer Res. (1979) 39:870; Gastpar et al., J Med Chem (1998) 41:4965; Ranson et al., Br J Cancer (1998) 77:1586; Kuang et al., Nucleic Acids Res (1998) 26:1116. The samples of libraries 15-20 are derived from two different patients (UC#2 and UC#3). The GRRpz and WOca cell lines were provided by Dr. Donna M. Peehl, Department of Medicine, Stanford University School of Medicine. GRRpz was derived from normal prostate epithelium. The WOca cell line is a Gleason Grade 4 cell line.

[0261] Each of the libraries is composed of a collection of cDNA clones that in turn are representative of the mRNAs expressed in the indicated mRNA source. In order to facilitate the analysis of the millions of sequences in each library, the sequences were assigned to clusters. The concept of “cluster of clones” is derived from a sorting/grouping of cDNA clones based on their hybridization pattern to a panel of roughly 300 7 bp oligonucleotide probes (see Drmanac et al., Genomics (1996) 37(1):29). Random cDNA clones from a tissue library are hybridized at moderate stringency to 300 7 bp oligonucleotides. Each oligonucleotide has some measure of specific hybridization to that specific clone. The combination of 300 of these measures of hybridization for 300 probes equals the “hybridization signature” for a specific clone. Clones with similar sequence will have similar hybridization signatures. By developing a sorting/grouping algorithm to analyze these signatures, groups of clones in a library can be identified and brought together computationally. These groups of clones are termed “clusters”.

[0262] Depending on the stringency of the selection in the algorithm (similar to the stringency of hybridization in a classic library cDNA screening protocol), the “purity” of each cluster can be controlled. For example, artifacts of clustering may occur in computational clustering just as artifacts can occur in “wet-lab” screening of a cDNA library with 400 bp cDNA fragments, at even the highest stringency. The stringency used in the implementation of cluster herein provides groups of clones that are in general from the same cDNA or closely related cDNAs. Closely related clones can be a result of different length clones of the same cDNA, closely related clones from highly related gene families, or splice variants of the same cDNA.

[0263] Differential expression for a selected cluster was assessed by first determining the number of cDNA clones corresponding to the selected cluster in the first library (Clones in 1^{st}), and the determining the number of cDNA clones corresponding to the selected cluster in the second library (Clones in 2^{nd}). Differential expression of the selected cluster in the first library relative to the second library is expressed as a “ratio” of percent expression between the two libraries. In general, the “ratio” is calculated by: 1) calculating the percent expression of the selected cluster in the first library by dividing the number of clones corresponding to a selected cluster in the first library by the total number of clones analyzed from the first library; 2) calculating the percent expression of the selected cluster in the second library by dividing the number of clones corresponding to a selected cluster in a second library by the total number of clones analyzed from the second library; 3) dividing the calculated percent expression from the first library by the calculated percent expression from the second library. If the “number of clones” corresponding to a selected cluster in a library is zero, the value is set at 1 to aid in calculation. The formula used in calculating the ratio takes into account the “depth” of each of the libraries being compared, i.e., the total number of clones analyzed in each library.

[0264] As a result of this library comparison, 17 polynucleotides, listed as SEQ ID NOS:1, 3, 5, 7, 9, 11-13, 15, 16, 18, 20, 22, 24, 26, 27 and 29 in the accompanying Sequence Listing and summarized in Table 2, were identified as corresponding to genes differentially expressed in colon cancer patient tissues. Table 2 provides: 1) the sequence identification number (“SEQ ID NO of polynucleotide”) assigned to each sequence for use in the present specification; 2) the cluster identification number (“CLUSTER”); 3) the Candidation Idnetification number; 4) ththe CHIR number (which serves as tha cross-reference to antisense oligos discussed below), with, for examplek CHIR7 having corresponding oligos CHIR7-2AS (antibsense) and CHIR7-RC (reverse control); 5) the sequence name (“SEQ NAME”) used as an internal identifier of the sequence; 6) the name assigned to the clone from which the sequence was isolated (“CLONE ID”); 7) the first nucleotide of the start and stop codons of identified open reading frames (“ORF start” and “ORF stop”); and 8) the sequence identification number (“SEQ ID NO of encoded polypeptide”) assigned to the encoded polypeptide, where appropriate. Because the provided polynucleotides represent partial mRNA transcripts, two or more polynucleotides of the invention may represent different regions of the same mRNA transcript and the same gene. Thus, if two or more sequences are identified as belonging to the same clone, then either sequence can be used to obtain the full-length mRNA or gene.

TABLE 2
Polynucleotide sequence identificaton and characterization

| | | | | | | | SEQ ID NO |
|---|---|---|---|---|---|---|---|
| SEQ | | Candidate | | SEQ | ORF | | of encoded |
| BID NO | CLUSTER | ID | CHIR | NAME | start | stop | polypeptide |
| 1 | 719 | 196 | CHIR-7 | SK1 | 21 | 396 | 2 |
| 3 | 9083 | 181 | CHIR-8 | SK2 | 219 | 693 | 4 |
| 5 | 115762 | 188 | CHIR-16 | SK5 | 5 | 1760 | 6 |
| 7 | 1665 | 195 | CHIR-9 | 1665 long | 78 | 642 | 8 |
| 9 | 1665 | 195 | CHIR-9 | 1665 short | 79 | 232 | 10 |
| 11 | 2334 | | | SK8 partial | | | |
| 12 | 2334 | | | SK8 full | | | |
| | | | | length | | | |
| 13 | 3376 | 118 | CHIR-11 | SK19 | 79 | 376 | 14 |
| 15 | 376130 | | | Junc2 | 181, 363, | 361, 542, 911 | |
| | | | | | 731 | | |
| 16 | 402380 | 202 | CHIR-33 | XD4 | 16 | 538 | 17 |
| 18 | 726682 | 198 | CHIR-43 | XD1 | 2 | 551 | 19 |
| 20 | 552930 | 174 | CHIR-42 | XD7 | 240 | 585 | 21 |
| 22 | 454001 | 161 | CHIR-29 | XD10 | 53 | 1700 | 23 |
| 24 | 378805 | 163 | CHIR-31 | XD11 | 10 | 400 | 25 |
| 26 | 374641 | 160 | CHIR-32 | 374641 long | 33, 420 | 183, 615 | |
| | | | | (Junc4) | | | |
| 27 | 374641 | 160 | CHIR-32 | 374641 short | 324 | 519 | 28 |
| | | | | (XD6) | | | |
| 29 | 374641 | 160 | CHIR-32 | 374641 | 40, 388 | 190, 583 | |
| | | | | electronic | | | |

[0265] Table 3 summarizes polynucleotides that correspond to genes differentially expressed in colon tissue from a single patient.

TABLE 3

| SEQ | | Normal | Tumor | High Met | Tumor/ | High Met/ | High Met/ |
|---|---|---|---|---|---|---|---|
| ID | | (Lib15) | (Lib16) | (Lib17) | Normal | Normal | Tumor |
| NO | CLUSTER | Clones | Clones | Clones | (Lib16/Lib15) | (Lib17/Lib15) | (Lib17/Lib16) |
| 1 | 719 | 0 | 20 | 27 | 20 | 27 | 1 |
| 3 | 9083 | 0 | 10 | 14 | 10 | 14 | 1 |
| 5 | 115762 | 0 | 6 | 7 | 6 | 7 | 1 |
| 7 | 1665 | 4 | 14 | 20 | 3.5 | 5 | 1 |
| 12 | 2334 | 0 | 6 | 1 | 6 | 1 | 0 |
| 13 | 3376 | 3 | 20 | 19 | 7 | 6 | 1 |
| 15 | 376130 | 0 | 9 | 15 | 9 | 15 | 2 |
| 16 | 402380 | 0 | 15 | 2 | 15 | 2 | 0 |
| 18 | 726682 | 0 | 52 | 0 | 52 | 0 | 0 |
| 20 | 552930 | 1 | 14 | 2 | 14 | 2 | 0 |
| 22 | 454001 | 0 | 8 | 13 | 8 | 13 | 2 |
| 24 | 378805 | 1 | 12 | 12 | 12 | 12 | 1 |
| 26 | 374641 | 9 | 47 | 129 | 5 | 14 | 3 |

### Example 2

### Analysis and Characterization of Polynucleotides of the Invention

[0266] Several of the provided polynucleotides contain one or more putative open reading frames (ORFs) encoding a gene product. The start and stop sites for these ORFs are listed in Table 2.

[0267] SEQ ID NO:15 contains three ORFs. The first ORF extends from nucleotide 181 to nucleotide 361. The second ORF extends from nucleotide 363 to nucleotide 542. The third ORF extends from nucleotide 731 to nucleotide 911.

[0268] SEQ ID NO:26 contains a 39-nucleotide insertion sequence (from nucleotide 269 to nucleotide 307) and two ORFs. The first ORF extends from nucleotide 33 to nucleotide 183. The second ORF extends from nucleotide 420 to nucleotide 615.

[0269] SEQ ID NO:29 is an electronic sequence according to the 5′-RACE result and contains two ORFs. The first ORF extends from nucleotide 40 to nucleotide 190. The second ORF extends from nucleotide 388 to nucleotide 583.

### Example 3

### Members of Protein Families

[0270] Translations of the provided polynucleotides were aligned with amino acid profiles that define either protein families or common motifs. Several of the polynucleotides of the invention were found to encode polypeptides having characteristics of a polypeptide belonging to a known protein family (and thus represent new members of these protein families) and/or comprising a known functional domain. Similarity between a query sequence and a protein family or motif was determined by (a) comparing the query sequence against the profile and/or (b) aligning the query sequence with the members of the family or motif.

[0271] Each of the profile hits is described in more detail below. Table 4 provides the corresponding SEQ ID NO of the provided polynucleotides that encode gene products with similarity or identity to the profile sequences. Similarity (strong or weak) is also noted in Table 4. The acronyms for the profiles (provided in parentheses) are those used to identify the profile in the Pfam and Prosite databases. The Pfam database can be accessed through any of the following URLS: http://pfam.wustl.edu/index.html; http://www.sanger.ac.uk/Software/Pfam/; and http://www.cgr.ki.se/Pfam/. The Prosite database can be accessed at http://www.expasy.ch/prosite/. The public information available on the Pfam and Prosite databases regarding the various profiles, including but not limited to the activities, function, and consensus sequences of various proteinss families and protein domains, is incorporated herein by reference.

TABLE 4
Profile hits.

| SEQ | | | | |
|---|---|---|---|---|
| ID NO | CLUSTER | Profile | Description | Similarity |
| 1 | 719 | | Glycosyl hydrolase | weak |
| 3 | 9083 | ANK | Ankyrin repeats | strong |
| 5 | 115762 | 7tm_1 | 7 transmembrane receptor | weak |
| | | | (rhodopsin family) | |
| 11 | 2334 | EFhand | EF-hand | strong |
| 12 | 2334 | Efhand | EF-hand | strong |
| 15 | 376130 | | Endogenous retrograde | |
| | | | protease/integrase | |
| 16 | 402380 | Rrm | RNA recognition motif. | |
| | | | (aka RRM, RBD, | |
| | | | or RNP domain) | |

[0272] Glycosyl hydrolase family 5 (GLYCOSYL_HYDROL_F5; Pfam Accession No. PS00659; PDOC00565). SEQ ID NO:1 corresponds to a gene encoding a polypeptide having homology to polypeptides of the glycosyl hydrolase family 5 (Henrissat Biochem. J. (1991) 280:309-316) (also known as the cellulase family A (Henrissat et al. Gene (1989) 81:83-95)). The members of this family participate in the degradation of cellulose and xylans, and are generally found in bacteria, fungi, and yeast. The consensus pattern for members of this family is: [LIV]-[LIVMFYWGA](2)-[DNEQG]-[LIVMGST]-x-N-E-[PV]-[RHDNSTLIVFY] (where E is a putative active site residue).

[0273] SEQ ID NO:1 corresponds to a gene encoding a member of one of the families of glycosyl hydrolases (Henrissat et al. Biochem. J. (1993) 293:781-788). These enzymes contain at least one conserved glutamic acid residue (or aspartic acid residue) which has been shown to be directly involved in glycosidic bond cleavage by acting as a nucleophile.

[0274] Ank Repeats (ANK; Pfam Accession No. PF0023). SEQ ID NO:3 corresponds to a gene encoding an Ank repeat-containing protein. The ankyrin motif is a 33 amino acid sequence named after the protein ankyrin which has 24 tandem 33-amino-acid motifs. Ank repeats were originally identified in the cell-cycle-control protein cdc10 (Breeden et al., Nature (1987) 329:651). Proteins containing ankyrin repeats include ankyrin, myotropin, I-kappaB proteins, cell cycle protein cdc10, the Notch receptor (Matsuno et al., Development (1997) 124(21):4265); G9a (or BAT8) of the class III region of the major histocompatibility complex (Biochem J. 290:811-818, 1993), FABP, GABP, 53BP2, Lin12, glp-1, SW14, and SW16. The functions of the ankyrin repeats are compatible with a role in protein-protein interactions (Bork, Proteins (1993) 17(4):363; Lambert and Bennet, Eur. J. Biochem. (1993) 211:1; Kerr et al., Current Op. Cell Biol. (1992) 4:496; Bennet et al., J. Biol. Chem. (1980) 255:6424).

[0275] Seven Transmembrane Integral Membrane Proteins—Rhodopsin Family (7tm_{—}1: Pfam Accession No. PF00001). SEQ ID NO:3 corresponds to a gene encoding a polypeptide that is a member of the seven transmembrane (7tm) receptor rhodopsin family. G-protein coupled receptors of the (7tm) rhodopsin family (also called R7G) are an extensive group of hormones, neurotransmitters, and light receptors which transduce extracellular signals by interaction with guanine nucleotide-binding (G) proteins (Strosberg A. D. Eur. J. Biochem. (1991) 196:1, Kerlavage A. R. Curr. Opin. Struct. Biol. (1991) 1:394, Probst, et al., DNA Cell Biol. (1992) 11:1, Savarese, et al., Biochem. J. (1992) 283:1, http://www.gcrdb.uthscsa.edu/, http://swift.embl-heidelberg.de/7tm/. The consensus pattern that contains the conserved triplet and that also spans the major part of the third transmembrane helix is used to detect this widespread family of proteins:

[GSTALIVMFYWC]-[GSTANCPDE]-{EDPKRH}-x(2)-
[LIVMNQGA]-x(2)-[LIVMFT]-[GSTANC]-[LIVMFYWSTAC]-
[DENH]-R-[FYWCSH]-x(2)-[LIVM].

[0276] [GSTALIVMFYWC]-[GSTANCPDE]-{EDPKRH}-x(2)-[LIVMNQGA]-x(2)-[LIVMFT]-[GSTANC]-[LIVMFYWSTAC]-[DENH]-R-[FYWCSH]-x(2)-[LIVM].

[0277] EF Hand (EFhand: Pfam Accession No. PF00036). SEQ ID NOS:11 and 12 correspond to genes encoding a protein in the family of EF-hand proteins. Many calcium-binding proteins belong to the same evolutionary family and share a type of calcium-binding domain known as the EF-hand (Kawasaki et al., Protein. Prof. (1995) 2:305-490). This type of domain consists of a twelve residue loop flanked on both sides by a twelve residue alpha-helical domain. In an EF-hand loop the calcium ion is coordinated in a pentagonal bipyramidal configuration. The six residues involved in the binding are in positions 1, 3, 5, 7, 9 and 12; these residues are denoted by X, Y, Z, —Y, —X and -Z. The invariant Glu or Asp at position 12 provides two oxygens for liganding Ca (bidentate ligand). The consensus pattern includes the complete EF-hand loop as well as the first residue which follows the loop and which seem to always be hydrophobic: D-x-[DNS]-{ILVFYW}-[DENSTG]-[DNQGHRK]-{GP}-[LIVMC]-[DENQSTAGC]-x(2)-[DE]-[LIVMFYW].

[0278] Endogenous retroviral protease/integrase. SEQ ID NO:15 corresponds to a gene encoding a polypeptide having a domain homologous to a human endogenous retrovirus protease/integrase domain of a retroviral pol protein.

[0279] RNA Recognition Motif (rrm: Pfam Accession No. PF00076). SEQ ID NO:16 corresponds to a gene encoding an RNA recognition motif, also known as an RRM, RBD, or RNP domain. This domain, which is about 90 amino acids long, is contained in eukaryotic proteins that bind single-stranded RNA (Bandziulis et al. Genes Dev. (1989) 3:431-437; Dreyfuss et al. Trends Biochem. Sci. (1988) 13:86-91). Two regions within the RNA-binding domain are highly conserved: the first is a hydrophobic segment of six residues (which is called the RNP-2 motif), the second is an octapeptide motif (which is called RNP-1 or RNP-CS). The consensus pattern is: [RK]-G-{EDRKHPCG}-[AGSCI]-[FY]-[LIVA]-x-[FYLM].

### Example 4

### Detection and Quantification of Polynucleotides of the Invention

[0280] The polynucleotides of the invention were detected and quantified in patient tissue samples by reverse transcriptase PCR (RT-PCR). Total RNA amplifications were performed using the LightCycler™ thermal cycling system (Roche Diagnostics) in a standard PCR reaction containing the provided primers and the dsDNA-binding dye SYBR Green I. PCR amplifacaiotn was monitored by fluroescence dye SYBR Green I, which fluroesces only when bound to double-stranded DNA. The specific of the products was verified by melting curve analysis.

[0281] Standard Preparation. 1 μg human placenta total RNA (Clontech, Palo Alto, Calif.) was reverse-transcribed at 42° C. for 1 hour then heated at 94° C. for 5 minutes in a total reaction volume of 20 μl (1st-Strand™ cDNA Synthesis Kit, Clontech). The reaction mix was used as 1× template standard. Serial dilutions from 1× template standard were then prepared: 10⁻¹×, 10⁻²×, 10⁻³×, 10⁻⁴×, 10⁻⁵×, 10⁻⁶× template standards.

[0282] Total RNA Sample Preparation. The patient tissue samples were shipped in frozen TRIZOL reagent. The samples were homogenized in TRIZOL reagent. Chloroform was then added to isolate RNA, followed by RNA precipitation with isopropanol. The RNA precipitates were washed with 75% ethanol, dried in air, then dissolved in RNase-free distilled water. Before reverse-transcription, RNA samples were treated with DNase I (RNase-free) (2 U/μl, Ambion, Austin, Tex.) and cleaned up using RNeasy Mini Kit (Qiagen, Santa Clarita, Calif.).

[0283] RT-PCR. Total RNA samples were reverse-transcribed with oligo-dT₁₈ primer (1st-Strand™ cDNA Synthesis Kit, Clontech). PCR was performed using the following gene-specific primers:

| | | | |
|---|---|---|---|
| SK1: | forward primer | 5′-AGGAGTTTCTGAGGACCATGCAC-3′ | (SEQ ID NO:30) |
| | reverse primer | 5′-TCAAGGGTTGGGGATACACACG-3′ | (SEQ ID NO:31) |
| SK2: | forward primer | 5′-CTTGCTTGCTTTCTTCTCTGGC-3′ | (SEQ ID NO:32) |
| | reverse primer | 5′-AGTCTGGAAATCCACATGACCAAG-3′ | (SEQ ID NO:33) |
| SK5: | forward primer | 5′-CCCAATGAGGAACCTAAAGTTGC-3′ | (SEQ ID NO:34) |
| | reverse primer | 5′-GGTGCCAAATCTGGACTCTTGTC-3′ | (SEQ ID NO:35) |
| 1665: | forward primer | 5′-GATCCATTTTCAGCAGTGCTCTG-3′ | (SEQ ID NO:36) |
| | reverse primer | 5′-CAGTGTTCACAGAAGGGGTACTCAC-3′ | (SEQ ID NO:37) |
| SK8: | forward primer | 5′-ACGAGAGCGACACGGACAAG-3′ | (SEQ ID NO:38) |
| | reverse primer | 5′-TCTGAGGCTGTGGCAGGTGC-3′ | (SEQ ID NO:39) |
| SK19: | forward primer | 5′-CCAGTCTTTGCCAACTCGTGC-3′ | (SEQ ID NO:40) |
| | reverse primer | 5′-TTCGATCTTCAAACTGTGCCTTG-3′ | (SEQ ID NO:41) |
| Junc2: | forward primer | 5′-TTGGCAACCAGACCAGCATC-3′ | (SEQ ID NO:42) |
| | reverse primer | 5′-TTTCCCATAGGTGTGAGTGGCG-3′ | (SEQ ID NO:43) |
| XD4: | forward primer | 5′-GACTGGTGTTTTGTTCGGGGTC-3′ | (SEQ ID NO:44) |
| | reverse primer | 5′-TTTGTCCAAGGCTGCATGGTC-3′ | (SEQ ID NO:45) |
| XD1: | forward primer | 5′-TGCCCTGGTTAAGCCAGAAGTC-3′ | (SEQ ID NO:46) |
| | reverse primer | 5′-AGCTTCACTTTGGTCTTGACGG-3′ | (SEQ ID NO:47) |
| XD7: | forward primer | 5′-GGTCATCTGCATCAAGGTTGGC-3′ | (SEQ ID NO:48) |
| | reverse primer | 5′-GGTTCGTAACCGTGACTTCAGG-3′ | (SEQ ID NO:49) |
| XD10: | forward primer | 5′-GCATCCTTTTCCAGTCTTCCG-3′ | (SEQ ID NO:50) |
| | reverse primer | 5′-TGCAGCAAACATGCCTGAGC-3′ | (SEQ ID NO:51) |
| XD11: | forward primer | 5′-TGTTCCACGAGCAAAGCATGTG-3′ | (SEQ ID NO:52) |
| | reverse primer | 5′-ATCCTTCTTCCACTCCCGCTTC-3′ | (SEQ ID NO:53) |
| 37641: | forward primer | 5′-TCGGCTTGACTACACTGTGTGG-3′ | (SEQ ID NO:54) |
| | reverse primer | 5′-TACAAAGACCACTGGGAGGCTG-3′ | (SEQ ID NO:55) |
| β-actin: | forward primer | 5′-CGGGAAATCGTGCGTGACATTAAG-3′ | (SEQ ID NO:56) |
| | reverse primer | 5′-TGATCTCCTTCTGCATCCTGTCGG-3′ | (SEQ ID NO:57) |
| GAPDH: | forward primer | 5′-TTTGGCTACAGCAACAGGGTG-3′ | (SEQ ID NO:58) |
| | reverse primer | 5′-TGTGAGGAGGGGAGATTCAGTG-3′ | (SEQ ID NO:59) |

[0284] β-actin and GAPDH were used as positive controls. All PCR products are 150-250 bp. The 20-μl PCR reaction mix in each LightCycler™ capillary contained 2 μl of 10×PCR buffer II, 3 mM MgCl₂ (Perkin-Elmer, Foster City, Calif.), 140 μM dNTP, 1:50000 of SYBR Green I, 0.25 mg/ml BSA, 1 unit of Taq polymerase (Boehringer Mannheim, Indianapolis, Ind.), 0.175 μM each primer, 2 μl of RT reaction mix. The PCR amplification began with 20-second denaturation at 95° C., followed by 45 cycles of denaturation at 95° C. for 5 seconds, annealing at 60° C. for 1 second and extension at 72° C. for 30 seconds. At the end of final cycle, PCR products were annealed at 60° C. for 5 seconds, then slowly heated to 95° C. at 0.2° C./second, to measure melting curve of specific PCR products. All experiments were performed in duplicate.

[0285] Data analysis was performed using LightCycler™ software (Roche Diagnostics) with quantification and melting curve options. Fluorescence is normalized relative to positive and negative controls.

[0286] Overexpression of genes in colon cancer patient whole tissue. Results provided in the tables below include fluoresence data for polynucleotides isolated from colon tissue samples that were harvested directly, not microdissected (i.e., whole tissue), and amplified using the indicated primers. Normal, primary tumor and metastatic cell types are denoted as N, PT and Met, respectively. Overexpression was determined by comparing either metastatic cells or primary tumor cells, or both, to normal cells. The results for each gene corresponding to the indicated clusters in each patient sample are summarized in the tables below. All values are adjusted to levels relative to beta-actin control.

Cluster#719 (SK1): overexpression detected in
4 of 6 patients (67%)

| Patients | N | PT | MET |
|---|---|---|---|
| UC#1 | 0.022 | 0.117 | 0.364 |
| UC#2 | 0.121 | 0.109 | 0.142 |
| UC#4 | 0.083 | 0.053 | 0.078 |
| UC#7 | 0.042 | 0.199 | 0.145 |
| UC#8 | 0.215 | 0.515 | 0.794 |
| UC#9 | 0.233 | 0.585 | 0.613 |

[0287] Cluster#9083 (SK2): overexpression inf 3 or 4
patients (75%)

| Patients | N | PT | MET |
|---|---|---|---|
| UC#1 | 0.0021 | 0.0013 | 0.0078 |
| UC#2 | 0.008 | 0.012 | 0.014 |
| UC#4 | 0.0021 | 0.0022 | 0.0026 |
| UC#7 | 0.0009 | 0.0021 | 0.0039 |

[0288] Cluster#115762 (SK5): overexpression in
5 of 6 patients (83%)

| Patients | N | PT | MET |
|---|---|---|---|
| UC#1 | 0.0053 | 0.0159 | 0.044 |
| UC#2 | 0.0195 | 0.0174 | 0.0269 |
| UC#4 | 0.022 | 0.033 | 0.034 |
| UC#7 | 0.013 | 0.028 | 0.025 |
| UC#8 | 0.0275 | 0.105 | 0.143 |
| UC#9 | 0.0336 | 0.0595 | 0.0541 |

[0289] Cluster#1665: overexpression in 4 of 6
patients (67%)

| Patients | N | PT | MET |
|---|---|---|---|
| UC#1 | 0.00006 | 0.0003 | 0.002 |
| UC#2 | 0.0015 | 0.001 | 0.0012 |
| UC#4 | 0.0016 | 0.0013 | 0.0016 |
| UC#7 | 0.00003 | 0.0003 | 0.0012 |
| UC#8 | 0.0016 | 0.0122 | 0.0154 |
| UC#9 | 0.006 | 0.057 | 0.097 |

[0290] Cluster#2334 (SK8): overexpression in 4
of 6 patients (67%)

| Patients | N | PT | MET |
|---|---|---|---|
| UC#1 | 0.011 | 0.022 | 0.017 |
| UC#2 | 0.0266 | 0.0317 | 0.026 |
| UC#4 | 0.02 | 0.006 | 0.01 |
| UC#7 | 0.046 | 0.093 | 0.042 |
| UC#8 | 0.042 | 0.168 | 0.472 |
| UC#9 | 0.208 | 0.322 | 0.29 |

[0291] Cluster#3376 (SK19): overexpression in 4
of 6 patients (67%)

| Patients | N | PT | MET |
|---|---|---|---|
| UC#1 | 0.00018 | 0.00042 | 0.0012 |
| UC#2 | 0.002 | 0.0025 | 0.0016 |
| UC#4 | 0.0013 | 0.0012 | 0.002 |
| UC#7 | 0.00024 | 0.00055 | 0.00062 |
| UC#8 | 0.0003 | 0.00127 | 0.0023 |
| UC#9 | 0.001 | 0.0075 | 0.009 |

[0292] Cluster#376130 (Junc2): overexpression
in 3 of 4 patients (75%)

| Patients | N | PT | MET |
|---|---|---|---|
| UC#1 | 0.00871 | 0.0111 | 0.0142 |
| UC#2 | 0.000567 | 0.00663 | 0.0163 |
| UC#4 | 0.000107 | 0.00048 | 0.000237 |
| UC#7 | 0.0000401 | 0.000259 | 0.00159 |

[0293] Cluster#402380 (XD4): overexpression in
2 of 4 patients (50%)

| Patients | N | PT | MET |
|---|---|---|---|
| UC#1 | 0.0763 | 0.123 | 0.2 |
| UC#2 | 0.0867 | 0.0629 | 0.069 |
| UC#4 | 0.0735 | 0.0672 | 0.0664 |
| UC#7 | 0.0559 | 0.112 | 0.139 |

[0294] Cluster#726682 (XD1): overexpression
in 0 of 4 patients

| Patients | N | PT | MET |
|---|---|---|---|
| UC#1 | 0.0679 | 0.0822 | 0.136 |
| UC#2 | 0.175 | 0.124 | 0.147 |
| UC#4 | 0.2 | 0.145 | 0.145 |
| UC#7 | 0.108 | 0.144 | 0.114 |

[0295] Cluster#552930 (XD7): overexpression in
1 of 4 patients (25%)

| Patients | N | PT | MET |
|---|---|---|---|
| UC#1 | 0.018 | 0.019 | 0.0902 |
| UC#2 | 0.204 | 0.161 | 0.212 |
| UC#4 | 0.299 | 0.25 | 0.238 |
| UC#7 | 0.246 | 0.409 | 0.248 |

[0296] Cluster#454001 (XD10): overexpression
in 2 of 4 patients)

| Patients | N | PT | MET |
|---|---|---|---|
| UC#1 | 0.0197 | 0.0363 | 0.0587 |
| UC#2 | 0.0514 | 0.0451 | 0.069 |
| UC#4 | 0.0587 | 0.0889 | 0.096 |
| UC#7 | 0.0342 | 0.1 | 0.0705 |

[0297] Cluster#378805 (XD11): overexpression
in 1 of 4 patients)

| Patients | N | PT | MET |
|---|---|---|---|
| UC#1 | 0.00117 | 0.00269 | 0.00697 |
| UC#2 | 0.00864 | 0.00371 | 0.00672 |
| UC#4 | 0.0098 | 0.00525 | 0.00497 |
| UC#7 | 0.00912 | 0.00989 | 0.0127 |

[0298] Cluster#374641: overexpression in 3 of 4
patients (75%)

| Patients | N | PT | MET |
|---|---|---|---|
| UC#1 | 0.0124 | 0.163 | 0.0947 |
| UC#2 | 0.28 | 0.317 | 0.544 |
| UC#4 | 0.685 | 1.809 | 1.996 |
| UC#7 | 0.569 | 1.714 | 1.073 |

[0299] Overexpression of genes in colon cancer patient epithelium. Results provided in the tables below include fluorescence data for polynucleotides isolated from colon epithelial cells that were prepared by the epithelial shakeoff method to obtain >97% pure epithelium without stroma. Normal, precancerous (adenomatous polyp), and primary tumor cell types are denoted as N, polyp and PT, respectively. Overexpression was determined by comparing either primary tumor cells or precancerous cells, or both, to normal cells. All values are adjusted to levels relative to beta-actin control.

Cluster#719 (SK1): overexpression in 4
of 4 patients (100%)

| Patients | N | Polyp | PT |
|---|---|---|---|
| UW#17 | 0.0924 | 0.117 | N/A |
| UW#18 | 0.0864 | N/A | 0.327 |
| UW#19 | 0.151 | N/A | 0.227 |
| UW#20 | 0.0624 | 0.162 | 0.164 |

[0300] Cluster#115762 (SK5): overexpression
in 4 of 4 patients (100%).

| Patients | N | Polyp | PT |
|---|---|---|---|
| UW#17 | 0.00724 | 0.0122 | N/A |
| UW#18 | 0.0156 | N/A | 0.111 |
| UW#19 | 0.0158 | N/A | 0.0461 |
| UW#20 | 0.00728 | 0.0187 | 0.0306 |

[0301] Cluster#1665: overexpression in 4 of 4
patients (100%)

| Patients | N | Polyp | PT |
|---|---|---|---|
| UW#17 | 0.0041 | 0.0306 | N/A |
| UW#18 | 0.0029 | N/A | 0.0357 |
| UW#19 | 0.0045 | N/A | 0.0357 |
| UW#20 | 0.0028 | 0.025 | 0.047 |

[0302] Cluster#2334 (SK8) overexpressed in 1
of 4 patients (25%)

| Patients | N | Polyp | PT |
|---|---|---|---|
| UW#17 | 0.1835 | 0.041 | N/A |

[0303] Cluster#2334 (SK8) overexpressed in 1
of 4 patients (25%)

| Patients | N | Polyp | PT |
|---|---|---|---|
| UW#18 | 0.0638 | N/A | 0.0927 |
| UW#19 | 0.04 | N/A | 0.04 |
| UW#20 | 0.2236 | 0.0576 | 0.0454 |

[0304] Cluster#3376 (SK19) overexpressed in 4 of 4 patients (100%)

| Patients | N | Polyp | PT |
|---|---|---|---|
| UW#17 | 0.0053 | 0.012 | N/A |
| UW#18 | 0.0028 | N/A | 0.0084 |
| UW#19 | 0.003 | N/A | 0.0135 |
| UW#20 | 0.0023 | 0.023 | 0.012 |

### Example 5

### Northern Blot Analysis

[0305] Differential gene expression in cancerous colon cells can be further confirmed by other techniques, such as Northern blot analysis. Northern analysis can be accomplished by methods well-known in the art. Briefly, rapid-Hyb buffer (Amersham Life Science, Little Chalfont, England) with 5 mg/ml denatured single stranded sperm DNA is pre-warmed to 65° C. and human colon tumor total RNA blots (Invitrogen, Carlsbad, Calif.) are pre-hybridized in the buffer with shaking at 65° C. for 30 minutes. Gene-specific DNA probes (50 ng per reaction) labeled with [α-32P]dCTP (3000 Ci/mmol, Amersham Pharmacia Biotech Inc., Piscataway, N.J.) (Prime-It RmT Kit, Stratagene, La Jolla, Calif.) and purified with ProbeQuant™ G-50 Micro Columns (Amersham Pharmacia Biotech Inc.) are added and hybridized to the blots with shaking at 65° C. for overnight. The blots are washed in 2×SSC, 0.1% (w/v) SDS at room temperature for 20 minutes, twice in 1×SSC, 0.1% (w/v) SDS at 65° C. for 15 minutes, then exposed to Hyperfilms (Amersham Life Science).

### Example 6

### Analysis of Expression of Gene Corresponding to SK2 (Cluster 9083 (c9083)) (SEQ ID NO:3) in Colorectal Carcinoma

[0306] The expression of the gene comprising the sequence of SK2, which clusters to cluster i.d. no. 9083, was examined by quantitative PCR in several cancer cell lines, including a number of colorectal carcinoma cell lines. The cells in which expression was tested are summarized below.

| Cell Line | Tissue Source | Cell Line | Tissue Source |
|---|---|---|---|
| MDA-MB-231 | Human breast; high metastatic | Caco-2 | Human colorectal |
| | potential (micromets in lung; | | adenocarcinoma |
| | adenocarcinoma; pleural | | |
| | effusion | | |
| MDA-MB-435 | Human breast, high metastatic | SW620 | Human colorectal |
| | potential (macrometastases in | | adenocarcinoma; from |
| | lung) | | metastatic site (lymph node) |
| MCF-7 | Human breast; non-metastatic | LS174T | High metastatic potential |
| | | | human colorectal |
| | | | adenocarcinoma |
| MDA-MB-468 | Human breast; adenocarcinoma | LOVO | Human colorectal |
| | | | adenocarcinoma; colon; from |
| | | | metastatic site (colon) |
| Alab | Human breast, metastatic | HT29 | Human colorectal |
| | | | adenocarcinoma; colon |
| SKOV3 | Human ovarian | SW480 | Human colorectal |
| | adenocarcinoma | | adenocarcinoma; colon |
| OVCAR3 | Human ovarian | HCT116 | Human colorectal carcinoma; |
| | adenocarcinoma | | colon |
| KM12C | Human colon; low metastatic | Colo | Human colorectal |
| | potential | 320DN | adenocarcinoma; colon |
| KM12L4 | Human colon; high metastatic | T84 | Human colorectal carcinoma; |
| | potential (derived from | | colon; from metastatic site |
| | Km12C) | | (lung) |
| DU 145 | Human prostate; carcinoma; | HCT15 | Human colorectal |
| | from metastatic site: brain | | adenocarcinoma; colon |
| HT1080 | Human sarcoma cell line; | CCD112 | Human colorectal |
| | | | adenocarcinoma, low |
| | | | metastatic potential |
| HMVEC | Primary human microvascular | DLD1 | Human colon; colorectal |
| | endothelial cells | | adenocarcinoma |
| 185B4 | normal breast epithelial cells; | 293 | kidney epithelial cells |
| | chemically transformed | | |
| LNCAP | prostate carcinoma; metastasis | GRDP | primary prostate epithelium |
| | to left supraclavicular lymph | | |
| U373MG | glioblastoma cell | IMR90 | primary lung fibroblast |
| WOCA | primary prostate epithelium | PC3 | prostate cancer; androgen |
| | | | receptor negative |

[0307] Quantitative real-time PCR was performed by first isolating RNA from cells using a Roche RNA Isolation kit according to manufacturer's directions. One microgram of RNA was used to synthesize a first-strand cDNA using MMLV reverse transcriptase (Ambion) using the manufacturers buffer and recommended concentrations of oligo dT, nucleotides, and Rnasin. This first-strand cDNA served as a template for quantitative real-time PCR using the Roche light-cycler as recommended in the machine manual. The gene corresponding to SK2 (C9083) (SEQ ID NO:3) was amplified with forward primer: 5′-cgctgacctcaaccag-3′ (SEQ ID NO:60) and reverse primer: 5′-ctgtttgcccgttcttattac-3′ (SEQ ID NO:61). Product was quantified based on the cycle at which the amplification entered the linear phase of amplification in comparison to an internal standard and using the software supplied by the manufacturer. Small differences in amounts or total template in the first-strand cDNA reaction were eliminated by normalizing to amount of actin amplified in a separate quantitative PCR reaction using the forward primer 5′-CGGGAAATCGTGCGTGACATTAAG-3′ (SEQ ID NO:56) and the reverse primer: 5′-TGATCTCCTTCTGCATCCTGTCGG-3′ (SEQ ID NO:57). The results are shown in FIG. 1

### Example 7

### Functional Analysis of Gene Corresponding to SK2 (c9083) (SEQ ID NO:3)

[0308] In order to further assess the role of the gene corresponding to SK2 (c9083) (SEQ ID NO:3), the functional information on the gene corresponding to this sequence was obtained using antisense knockout technology. In short, the cell type to be tested, SW620 or HT1080 cells which express the polypeptide encoded by the gene corresponding to c9083, were plated to approximately 60-80% confluency on 6-well or, for proliferation assays, 96-well dishes. Antisense or reverse control oligonucleotide was diluted to 2 μM in optimem and added to optimem into which the delivery vehicle, lipitoid 116-6 in the case of SW620 cells or 1:1 lipitoid 1:cholesteroid 1 in the case of HT1080 cells, had been diluted. The oligo/delivery vehicle mixture was then further diluted into medium with serum on the cells. The final concentration of oligonucleotide for all experiments was 300 nM, and the final ratio of oligo to delivery vehicle for all experiments was 1.5 nmol lipitoid/μg oligonucleotide. Cells were transfected overnight at 37 C and the transfection mixture was replaced with fresh medium the next morning.

[0309] The following antisense oligonucleotides were tested for the ability to deplete c9083 (SEQ ID NO:3) RNA:

| Olig Name | Sequence | Nucleotides |
|---|---|---|
| CHIR-8-4AS | ATTTGGGCATCACTGGCTACAAGCA | 25 |
| C9083:P0463 | (SEQ ID NO:64) | |
| CHIR-8-4RC | ACGAACATCGGTCACTACGGGTTTA | 25 |
| C9083:P0463RC | (SEQ ID NO:65) | |
| CHIR-8-5A5 | CAGAGAGGTGAGACACTCGCCGCA | 24 |
| C9083:P0157 | (SEQ ID NO:66) | |
| CHIR-8-5RC | ACGCCGCTCACAGAGTGGAGAGAC | 24 |
| C9083:POI57RC | (SEQ ID NO:67) | |

RC: reverse control oligos (control oligos);
AS: antisense oligos (test)

[0310] The effect of the oligonucleotide on the cells was assessed by both quantitation of PCR levels as described above, and in proliferation assays using amount of DNA as quantified with the Stratagene Quantos™ kit to determine cell number.

[0311] The results of the mRNA level quantitation are shown in FIG. 2. The effects of the oligonucleotides upon proliferation over a four day period are shown in FIGS. 3 and 4. Cells without oligonucleotide treatment (WT) served as a control. The oligo CHIR-8-4AS was most effective in decreasing mRNA for the gene corresponding to 9083c. Transfection of these oligos into SW620 cells resulted in a decreased rate of proliferation relative to matched reverse control oligos, with CHIR-8-4 being somewhat more effective than CHIR-8-5 (FIG. 3). Significantly, the same antisense oligonucleotide had no effect on growth of a fibrosarcoma cell line, HT1080 (FIG. 4). This indicates that the functional role of the gene corresponding to c9083 is tissue-specific, and further that the gene corresponding to c9083 has a specific effect on growth.

[0312] The oligos were next tested for their effect on colony formation in a soft agar assay. Soft agar assays were conducted by first establishing a bottom layer of 2 ml of 0.6% agar in media plated fresh within a few hours of layering on the cells. The cell layer was formed on the bottom layer by removing cells transfected as described above (either an antisense k-Ras oligo as a positive control), CHIR-8-4, CHIR-8-5, CHIR-8-4RC, or CHIR-8-5RC) from plates using 0.05% trypsin and washing twice in media. The cells were counted in a Coulter counter, and resuspended to 10⁶ per ml in media. 10 μl aliquots are placed with media in 96-well plates (to check counting with WST1), or diluted further for soft agar assay. 2000 cells are plated in 800 μl 0.4% agar in duplicate wells above 0.6% agar bottom layer. After the cell layer agar solidifies, 2 ml of media is dribbled on top and antisense or reverse control oligo is added without delivery vehicles. Fresh media and oligos are added every 3-4 days. Colonies are formed in 10 days to 3 weeks. Fields of colonies were counted by eye. WST-1 metabolism values can be used to compensate for small differences in starting cell number. Larger fields can be scanned for visual record of differences.

[0313] Both the CHIR-8-4 and CHIR-8-5 antisense oligos led to decreased colony size and number compared to the control CHIR-8-4RC and CHIR-8-5RC oligos. These results further validate the gene corresponding to c9083 (SEQ ID NO:3) as a target for therapeutic intervention.

### Example 8

### Effect of Antisense Oligonucleotides on Message Levels for Target Genes

[0314] The effect of antisense oligonucleotides upon message levels for the genes corresponding to the sequences and clusters described herein was analyzed using antisense knockout technology as described for c9083 in the Example above. Specifically, antisense oligos for genes corresponding to each of c719, c1665, c3376, c115762, c454001, c3788805, and c776682 were prepared as described above. Once synthesized and quantitated, the oligomers were screened for efficiency of a transcript knock-out in a panel of cancer cell lines. The efficiency of the knock-out was determined by analyzing mRNA levels using lightcycler quantification. The oligomers that resulted in the highest level of transcript knock-out, wherein the level was at least about 50%, preferably about 80-90%, up to 95% or more up to undetectable message, were selected for use in a cell-based proliferation assay, an anchorage independent growth assay, and an apoptosis assay.

[0315] SW620 cells, which express the polypeptide encoded by the corresponding genes to be analyzed, were plated to approximately 60-80% confluency on 6-well or, for proliferation assays, 96-well dishes. For each transfection mixture, a carrier molecule, preferably a lipitoid or cholesteroid, was prepared to a working concentration of 0.5 mM in water, sonicated to yield a uniform solution, and filtered through a 0.45 μm PVDF membrane. The antisense or control oligonucleotide was then prepared to a working concentration of 100 μM in sterile Millipore water. The oligonucleotide was further diluted in OptiMEM™ (Gibco/BRL), in a microfuge tube, to 2 μM, or approximately 20 μg oligo/ml of OptiMEM™. In a separate microfuge tube, lipitoid or cholesteroid, typically in the amount of about 1.5-2 mmol lipitoid/μg antisense oligonucleotide, was diluted into the same volume of OptiMEM™ used to dilute the oligonucleotide. The diluted antisense oligonucleotide was immediately added to the diluted lipitoid and mixed by pipetting up and down. Oligonucleotide was added to the cells to a final concentration of 30 nM.

[0316] The level of target mRNA that corresponds to a target gene of interest in the transfected cells was quantitated in the cancer cell lines using the Roche LightCycler™ real-time PCR machine. Values for the target mRNA were normalized versus an internal control (e.g., beta-actin). For each 20 μl reaction, extracted RNA (generally 0.2-1 μg total) was placed into a sterile 0.5 or 1.5 ml microcentrifuge tube, and water was added to a total volume of 12.5 μl. To each tube was added 7.5 μl of a buffer/enzyme mixture, prepared by mixing (in the order listed) 2.5 μl H₂O, 2.0 μl 10× reaction buffer, 10 μl oligo dT (20 pmol), 1.0 μl dNTP mix (10 mM each), 0.5 μl RNAsin® (20 u) (Ambion, Inc., Hialeah, Fla.), and 0.5 μl MMLV reverse transcriptase (50 u) (Ambion, Inc.). The contents were mixed by pipetting up and down, and the reaction mixture was incubated at 42° C. for 1 hour. The contents of each tube were centrifuged prior to amplification.

[0317] An amplification mixture was prepared by mixing in the following order: 1×PCR buffer II, 3 mM MgCl₂, 140 μM each dNTP, 0.175 pmol each oligo, 1:50,000 dil of SYBR® Green, 0.25 mg/ml BSA, 1 unit Taq polymerase, and H₂O to 20 μl. (PCR buffer II is available in 10× concentration from Perkin-Elmer, Norwalk, Conn.). In 1× concentration it contains 10 mM Tris pH 8.3 and 50 mM KCl. SYBR® Green (Molecular Probes, Eugene, Oreg.) is a dye which fluoresces when bound to double stranded DNA. As double stranded PCR product is produced during amplification, the fluorescence from SYBR® Green increases. To each 20 μl aliquot of amplification mixture, 2 μl of template RT was added, and amplification was carried out according to standard protocols.

[0318] The following antisense oligonucleotides were tested for the ability to deplete the message levels of the gene corresponding to the indicated cluster. Target Gene: Oligo Location provides the name of the cluster to which the target gene is assigned and the name of the oligo used. AS indicates antisense; RC indicates reverse control. Data for the genes corresponding to c9083 are provided for comparison.

| Target | | | % KO of |
|---|---|---|---|
| Gene:Oligo Location | Oligo Sequence | SEQ ID NO: | Message |
| c719:1-AS | TTGGTGTCATTGGGTCAAGGGTTGG | 68 | 85% |
| C719:1-RC | GGTTGGGAACTGGGTTACTGTGGTT | 69 | |
| c719:2-AS | ACAGGGCAGATACGGACCTCGGTG | 70 | 93% |
| c719:2-RC | GTGGCTCCAGGCATAGACGGGACA | 71 | |
| c719:3-AS | TTGTGGGTAAGCAGTTTCATGTCGC | 72 | 67% |
| c719:3-RC | CGCTGTACTTTGACGAATGGGTGTT | 73 | |
| c719:4-AS | CCTGGATCAGACGCAAGTTATCGGC | 74 | 85% |
| c719:4-RC | CGGCTATTGAACGCAGACTAGGTCC | 75 | |
| C9083:4-AS | ATTTGGGCATCACTGGCTACAAGCA | 64 | 83.0 |
| C9083:4-RC | ACGAACATCGGTCACTACGGGTTTA | 65 | |
| C9083:5-AS | CAGAGAGGTGAGACACTCGCCGCA | 66 | 73.0 |
| C9083:5-RC | ACGCCGCTCACAGAGTGGAGAGAC | 67 | |
| C1665:1-AS | CTACTCCCCACACTTCATCGCCAGG | 76 | 73.0 |
| C1665:1-RC | GGACCGCTACTTCACACCCCTCATC | 77 | |
| C1665:2-AS | CTCTTGATACTCCAGCGGCAAACCA | 78 | 81.0 |
| C1665:2-RC | ACCAAACGGCGACCTCATAGTTCTC | 79 | |
| c3376:1-AS | GCGCCCAAGCCGTTCGTTCTTAAG | 80 | 78.0 |
| c3376:1-RC | GAATTCTTGCTTGCCGAACCCGCG | 81 | |
| c3376:2-AS | CCAGGTAGGCACGAGTTGGCAAAGA | 82 | 97.0 |
| c3376:2-RC | AGAAACGGTTGAGCACGGATGGACC | 83 | |
| c3376:3-AS | GCCATTGAAGATGCCCAGATCCCAC | 84 | 56.0 |
| c3376:3-RC | CACCCTAGACCCGTAGAAGTTACCG | 85 | |
| c3376:4-AS | CCTGCGTTTGTCCCTCCAGCATCT | 86 | 93.0 |
| c3376:4-RC | TCTACGACCTCCCTGTTTGCGTCC | 87 | |
| c3376:5-AS | AAGTCACAGTCCCCGGATACCAGTC | 88 | 88.0 |
| c3376:5-RC | CTGACCATAGGCCCCTGACACTGAA | 89 | |
| c115762:1-AS | TTGTCGCTTTGGCAGGCATAAAACC | 90 | 97.5 |
| c115762:2-AS | TCTGGTCATCAACTTGCTTTCCGTG | 91 | 99.0 |
| c115762:3-AS | CAGTGTTTCGTGGTGTGCTCTGTGG | 92 | 98.0 |
| c115762:4-AS | GCTCACCATCCGGGCACCAAGCA | 93 | 97.0 |
| c115762:5-AS | TGAGAGACAGTGTTTCGTGGTGTGC | 94 | 93.0 |
| 454001:1-AS | TGCCTTCACACGCTTGGTTATCTTC | 95 | 0 |
| 454001:2-AS | GACAACATCGGAGGCTTCAATCACC | 96 | 0 |
| 454001:3-AS | GTTGAGGCTCTGAACACCACTGTTG | 97 | 0 |
| 454001:4-AS | GTTTGGCAGCACCTTCAACATTTGG | 98 | 87 |
| 454001:5-AS | AGCAGTTTGGCAGCACCTTCAACA | 99 | 92 |
| 454001:-1-RC | CTTCTATTGGTTCGCACACTTCCGT | 100 | |
| 454001:2-RC | CCACTAACTTCGGAGGCTACAACAG | 101 | |
| 454001:3-RC | GTTGTCACCACAAGTCTCGGAGTTG | 102 | |
| 454001:4-RC | GGTTTACAACTTCCACGACGGTTTG | 103 | |
| 454001:5-RC | ACAACTTCCACGACGGTTTGACGA | 104 | |
| 378805:1-AS | ATCTGGCATGGACGGATGAGCGAA | 105 | 41.0 |
| 378805:2-AS | GCTGGGTGGTTTCCGAACTCAACG | 106 | 97 |
| 378805:3-AS | GTCCCAATCACCTTCCCCACAATCC | 107 | 65.0 |
| 378805:4-AS | TCAGATCCTTCTTCCACTCCCGCTT | 108 | 100.0 |
| 378805:5-AS | TGCTCGTGGAACAGGTAAAGCTCTG | 109 | 98 |
| 378805:1-RC | AAGCGAGTAGGCAGGTACGGTCTA | 110 | |
| 378805:2-RC | GCAACTCAAGCCTTTGGTGGGTCG | 111 | |
| 378805:3-RC | CCTAACACCCCTTCCACTAACCCTG | 112 | |
| 378805:4-RC | TTCGCCCTCACCTTCTTCCTAGACT | 113 | |
| 378805:5-RC | GTCTCGAAATGGACAAGGTGCTCGT | 114 | |
| 776682:1-AS | AGCTTCACTTTGGTCTTGACGGCAT | 115 | 81 |
| 776682:2-AS | CGGAGGGAAGTCAAGTCAGCCACA | 116 | 60 |
| 776682:3-AS | CGGCATTCACCCTCTCCAGCACCT | 117 | 89 |
| 776682:4-AS | CCTCCACCTGTTTGCGGGCTTCC | 118 | 61 |
| 776682:5-AS | CCACATTGAGGGAGTCCTCTTGCAA | 119 | 80 |
| 776682:1-RC | TACGGCAGTTCTGGTTTCACTTCGA | 120 | |
| 776682:2-RC | ACACCGACTGAACTGAAGGGAGGC | 121 | |
| 776682:3-RC | TCCACGACCTCTCCCACTTACGGC | 122 | |
| 776682:5-RC | CCTTCGGGCGTTTGTCCACCTCC | 123 | |
| 402380:P464:4-AS | CCCCGAACAAAACACCAGTCAACG | 124 | 94 |
| 402380:P464:4-RC | GCAACTGACCACAAAACAAGCCCC | 125 | |
| 402380:P414:5 AS | GGCCATTGAGTCCCTCCATAGCAGC | 126 | 92 |
| 402380:P414:5-RC | CGACGATACCTCCCTGAGTTACCGG | 127 | |

[0319] The effect of the oligonucleotide on the cells was assessed by quantitation of PCR levels. The results of the mRNA level quantitation are summarized in the table immediately above.

[0320] The effect of the loss of message for each gene above can be assessed in cell-based assays as described in Example 7 above. One such use of the antisense oligonucleotide described by SEQ ID NO:108 resulted in an inhibition of proliferation of SW620 cells when used as described in the transfection and proliferation assay protocols in Example 7 (FIG. 5).

### Example 9

### The Effect of Expression of Genes Corresponding to c3376 and 402380 Upon on Proliferation

[0321] The effect of expression of genes corresponding to c3376 (gene corresponding to SEQ ID NO:13) and 402380 (gene corresponding to SEQ ID NO:16) on the inhibition of cell proliferation was assessed in SW620 colon colorectal carcinoma cells.

[0322] Cells were plated to approximately 60-80% confluency in 96-well dishes. Antisense or reverse control oligonucleotide was diluted to 2 μM in OptiMEM™ and added to OptiMEM™ into which the delivery vehicle, lipitoid 116-6 in the case of SW620 cells or 1:1 lipitoid 1:cholesteroid 1 in the case of MDA-MB-231 cells, had been diluted. The oligo/delivery vehicle mixture was then further diluted into medium with serum on the cells. The final concentration of oligonucleotide for all experiments was 300 nM, and the final ratio of oligo to delivery vehicle for all experiments was 1.5 nmol lipitoid/μg oligonucleotide.

[0323] Antisense oligonucleotides were prepared as described above. Cells were transfected overnight at 37° C. and the transfection mixture was replaced with fresh medium the next morning. Transfection was carried out as described above in Example 8. Proliferaton was measured using the colormetric reagent WST-1 according to methods well known in the art. The results of the antisense experiments are shown in FIGS. 6-9. The values on the y-axis represent relative fluorescent units. Antisense and reverse control oligos to K-Ras served as a control to demonstrate the assay worked as expected (FIG. 6).

### Example 10

### Effect of Gene Expression on Colony Formation in Soft Agar

[0324] The effect of expression of the gene corresponding to 402380 (gene corresponding to SEQ ID NO:16) upon colony formation of SW620 cells was tested in a soft agar assay. Soft agar assays were conducted by first establishing a bottom layer of 2 ml of 0.6% agar in media plated fresh within a few hours of layering on the cells. The cell layer was formed on the bottom layer by removing cells transfected as described above from plates using 0.05% trypsin and washing twice in media. The cells were counted in a Coulter counter, and resuspended to 10⁶ per ml in media. 10 μl aliquots were placed with media in 96-well plates (to check counting with WST-1), or diluted further for the soft agar assay. 2000 cells were plated in 800 μl 0.4% agar in duplicate wells above 0.6% agar bottom layer. After the cell layer agar solidified, 2 ml of media was dribbled on top and antisense or reverse control oligo (produced as described above) was added without delivery vehicles. Fresh media and oligos were added every 3-4 days. Colonies formed in 10 days to 3 weeks. Fields of colonies were counted by eye. Wst-1 metabolism values were used to compensate for small differences in starting cell number. Larger fields can be scanned for visual record of differences.

[0325] The results are shown in FIG. 9. The y-axis represents the number of cells per a defined sector, using WST-1 to facilitate cell count and normalized to a control. Antisense and reverse control oligos to K-Ras (kRAS 2576-as and kRAS 2576-rc) served as controls to demonstrate the assay worked as expected.

### Example 11

### Effect of Gene Expression Upon Cell Death

[0326] Effect of expression of the genes corresponding to cluster 719 (gene corresponding to SEQ ID NO:1, CHIR-7); cluster 9083 (gene corresponding to SEQ ID NO:3, CHIR-8); cluster 1665 (gene corresponding to SEQ ID NOS:7 and 9, CHIR-9); cluster 3376 (gene corresponding to SEQ ID NO:13, CHIR-11); cluster 115762 (gene corresponding to SEQ ID NO:5, CHIR-16); and cluster 402380 (gene corresponding to SEQ ID NO:16, CHIR-33) upon cell death in an lactatae dehydrobenase (LDH) cytotoxitity assay was examined in HT1080 cells (a human fibrosarcoma cell line), SW620 cells, and metastatic breast cancer cell lines (MDA-MB-231 (“231”)) cells. The lactate dehydrogenase (LDH) cytotoxicity assay essentially as follows:

[0327] The lactate dehydrogenase (LDH) cytotoxicity assay was performed essentially as follows:

[0328] Day 1: Cells were seeded in 4 separate 96 well plates, typically 5000 cells/well and incubated at 37° C. and 5% CO₂.

[0329] Day 2: Cells were transfected with the anti-sense as well as the reverse complement controls, essentially as described in Example 4. One plate (day 0) was left untransfected as a seeding control.

[0330] The transfection was carried out using a lipid vehicle for delivery as described in WO 01/16306, hereby incorporated in its entirety. Briefly, the transfection used agents known as “lipitoids” and “cholesteroids”, described, for example, in PCT publications WO 01/16306, WO 98/06437 and WO 99/08711, based on U.S. Ser. Nos. 60/023,867, 60/054,743, and 09/132,808, which are also hereby incorporated by reference. These lipid-cationic peptoid conjugates are shown in these references to be effective reagents for the delivery of plasmid DNA to cells in vitro. Any of the carriers described in the above-referenced applications are suitable for use in transfection of the oligonucleotides described herein.

[0331] These compounds may be prepared by conventional solution or solid-phase synthesis. In one such procedure, as described in WO 99/08711, cited above, the N-terminus of a resin-bound peptoid is acylated with a spacer such as Fmocaminohexanoic acid or Fmoc-3-alanine. After removal of the Fmoc group, the primary amino group is reacted with cholesterol chloroformate to form a carbamate linkage. The product is then cleaved from the resin with trifluoroacetic acid and purified by reverse-phase HPLC. A fatty acid-derived lipid moiety, such as a phospholipid, may be used in place of the steroid moiety. The steroid or other lipid moiety may also be linked to the peptoid moiety by other linkages, of any effective length, readily available to the skilled practitioner.

[0332] Depending on the cell type, different lipid vehicles were used for different lengths of time for transfection. However, the transfection time did not exceed 24 hrs. The transfection was carried out in complete medium and the final anti-sense oligonucleotide concentration was 300 nM per well. In the wells with drug, the drug was added to the culture at the beginning of the transfection.

[0333] Starting on day 3: cells were recovered, 1 plate/day and release of LDH into the supernatant as well as LDH in intact cells was measured using a kit from Roche according to manufacturer's instructions (Roche Diagnostics, Basel, Switzerland) (data labeled as day 1, 2, 3).

[0334] For each sample, were analyzed by examining the relative level of released LDH compared to total LDH, wherein an increase as a portion of total LDH signifies increased cell death (due to a higher proportion of released LDH in the media). The data was assessed qualitatively by comparison to an untreated control (no oligo). This assay allowed a determination as to whether antisense-induced loss of message for a particular gene causes death of cells when used alone, or wheter this loss of message sensitizes cells to the effects of a drug.

[0335] The results are shown in the table immediately below.

| | HT1080 | SW620 | 231 |
|---|---|---|---|
| chir7-2 | negative | negative | |
| chir8-4 | positive | weakly positive | |
| chir9-5 | | positive | |
| chir11-2 | | negative | |
| chir16-4 | | negative | |
| chir33-4 | very weakly | strong positive | very weakly |
| | positive | | positive |

### Example 12

### Detection of Differential Expression Using Arrays

[0336] mRNA isolated from samples of cancerous and normal colon tissue obtained from patients were analyzed to identify genes differentially expressed in cancerous and normal cells. Normal and cancerous cells collected from cryopreserved patient tissues were isolated using laser capture microdissection (LCM) techniques, which techniques are well known in the art (see, e.g., Ohyama et al. (2000) Biotechniques 29:530-6; Curran et al. (2000) Mol. Pathol. 53:64-8; Suarez-Quian et al. (1999) Biotechniques 26:328-35; Simone et al. (1998) Trends Genet 14:272-6; Conia et al. (1997) J. Clin. Lab. Anal. 11:28-38; Emmert-Buck et al. (1996) Science 274:998-1001).

[0337] Table 5 (inserted before the claims) provides information about each patient from which the samples were isolated, including: the “Patient ID” and “Path ReportID”, which are numbers assigned to the patient and the pathology reports for identification purposes; the “Group” to which the patients have been assigned; the anatomical location of the tumor (“Anatom Loc”); the “Primary Tumor Size”; the “Primary Tumor Grade”; the identification of the histopathological grade (“Histopath Grade”); a description of local sites to which the tumor had invaded (“Local Invasion”); the presence of lymph node metastases (“Lymph Node Met”); the incidence of lymph node metastases (provided as a number of lymph nodes positive for metastasis over the number of lymph nodes examined) (“Incidence Lymphnode Met”); the “Regional Lymphnode Grade”; the identification or detection of metastases to sites distant to the tumor and their location (“Distant Met & Loc”); a description of the distant metastases (“Descrip Distant Met”); the grade of distant metastasis (“Dist Met Grade”); and general comments about the patient or the tumor (“Comments”). Adenoma was not described in any of the patients; adenoma dysplasia (described as hyperplasia by the pathologist) was described in Patient ID No. 695. Extranodal extensions were described in two patients, Patient ID Nos. 784 and 791. Lymphovascular invasion was described in seven patients, Patient ID Nos. 128, 278, 517, 534, 784, 786, and 791. Crohn's-like infiltrates were described in seven patients, Patient ID Nos. 52, 264, 268, 392, 393, 784, and 791.

TABLE 5

| | | | | Primary | Primary | | | | Incidence | Regional Lymp | Distant | Descrip | | |
|---|---|---|---|---|---|---|---|---|---|---|---|---|---|---|
| Patient | Path Report | | Anatom | Tumor | Tumor | Histo path | Local | Lymph node | Lymph | node | Met & | Distant | Dist Met | |
| ID | ID | Group | Loc | Size | Grade | Grade | Invasion | Met | node Met | Grade | Loc | Met | Grade | Comment |
| 15 | 21 | III | Ascending | 4.0 | T3 | G2 | extending | positive | 3/8 | N1 | negative | | MX | invasive |
| | | | colon | | | | into | | | | | | | adenocarcinoma, |
| | | | | | | | subserosal | | | | | | | moderately |
| | | | | | | | adipose | | | | | | | differentiated; |
| | | | | | | | tissue | | | | | | | focal |
| | | | | | | | | | | | | | | perineural |
| | | | | | | | | | | | | | | invasion is |
| | | | | | | | | | | | | | | seen |
| 52 | 71 | II | Ascending | 9.0 | T3 | G3 | Invasion | negative | 0/12 | N0 | negative | | M0 | Hyperplastic |
| | | | colon | | | | through | | | | | | | polypin |
| | | | | | | | muscularis | | | | | | | appendix. |
| | | | | | | | propria, | | | | | | | |
| | | | | | | | subserosal | | | | | | | |
| | | | | | | | involvement; | | | | | | | |
| | | | | | | | ileocec. | | | | | | | |
| | | | | | | | valve | | | | | | | |
| | | | | | | | involvement | | | | | | | |
| 121 | 140 | II | Sigmoid | 6 | T4 | G2 | Invasion | negative | 0/34 | N0 | negative | | M0 | Perineural |
| | | | | | | | of | | | | | | | Invasion; |
| | | | | | | | muscularis | | | | | | | donut |
| | | | | | | | propria | | | | | | | anastomos |
| | | | | | | | into | | | | | | | is |
| | | | | | | | serosa, | | | | | | | negative. |
| | | | | | | | involving | | | | | | | One |
| | | | | | | | submucosa | | | | | | | tubulovillous |
| | | | | | | | of | | | | | | | and |
| | | | | | | | urinary | | | | | | | one |
| | | | | | | | bladder | | | | | | | tubular |
| | | | | | | | | | | | | | | adenoma |
| | | | | | | | | | | | | | | with no |
| | | | | | | | | | | | | | | high grade |
| | | | | | | | | | | | | | | dysplasia. |
| 125 | 144 | II | Cecum | 6 | T3 | G2 | Invasion | negative | 0/19 | N0 | negative | | M0 | patient |
| | | | | | | | through | | | | | | | history of |
| | | | | | | | the | | | | | | | metastatic |
| | | | | | | | muscularis | | | | | | | melanoma |
| | | | | | | | propria | | | | | | | |
| | | | | | | | into | | | | | | | |
| | | | | | | | suserosal | | | | | | | |
| | | | | | | | adipose | | | | | | | |
| | | | | | | | tissue. | | | | | | | |
| | | | | | | | Ileocecal | | | | | | | |
| | | | | | | | junction. | | | | | | | |
| 128 | 147 | III | Transverse | 5.0 | T3 | G2 | Invasion | positive | 1/5 | N1 | negative | | M0 | |
| | | | colon | | | | of | | | | | | | |
| | | | | | | | muscularis | | | | | | | |
| | | | | | | | propria | | | | | | | |
| | | | | | | | into | | | | | | | |
| | | | | | | | percolonic | | | | | | | |
| | | | | | | | fat | | | | | | | |
| 130 | 149 | | Splenic | 5.5 | T3 | | through | positive | 10/24 | N2 | negative | | M1 | |
| | | | flexure | | | | wall | | | | | | | |
| | | | | | | | and | | | | | | | |
| | | | | | | | into | | | | | | | |
| | | | | | | | surrounding | | | | | | | |
| | | | | | | | adipose | | | | | | | |
| | | | | | | | tissue | | | | | | | |
| 133 | 152 | II | Rectum | 5.0 | T3 | G2 | Invasion | negative | 0/9 | N0 | negative | | M0 | Small |
| | | | | | | | through | | | | | | | separate |
| | | | | | | | muscularis | | | | | | | tubular |
| | | | | | | | propria | | | | | | | adenoma |
| | | | | | | | into | | | | | | | (0.4 cm) |
| | | | | | | | non- | | | | | | | |
| | | | | | | | peritonealized | | | | | | | |
| | | | | | | | pericolic | | | | | | | |
| | | | | | | | tissue; | | | | | | | |
| | | | | | | | gross | | | | | | | |
| | | | | | | | configuration | | | | | | | |
| | | | | | | | is | | | | | | | |
| | | | | | | | annular. | | | | | | | |
| 141 | 160 | IV | Cecum | 5.5 | T3 | G2 | Invasion | positive | 7/21 | N2 | positive | adenocarcinoma | M1 | Perineural |
| | | | | | | | of | | | | (Liver) | consistant | | invasion |
| | | | | | | | muscularis | | | | | with | | identified |
| | | | | | | | propria | | | | | primary | | adjacent |
| | | | | | | | into | | | | | | | to |
| | | | | | | | pericolonic | | | | | | | metastatic |
| | | | | | | | adipose | | | | | | | adenocarcinoma. |
| | | | | | | | tissue, | | | | | | | |
| | | | | | | | but | | | | | | | |
| | | | | | | | not | | | | | | | |
| | | | | | | | through | | | | | | | |
| | | | | | | | serosa. | | | | | | | |
| | | | | | | | Arising | | | | | | | |
| | | | | | | | from | | | | | | | |
| | | | | | | | tubular | | | | | | | |
| | | | | | | | adenoma. | | | | | | | |
| 156 | 175 | III | Hepatic | 3.8 | T3 | G2 | Invasion | positive | 2/13 | N1 | negative | | M0 | Separate |
| | | | flexure | | | | through | | | | | | | tubolovillous |
| | | | | | | | mucsularis | | | | | | | and |
| | | | | | | | propria | | | | | | | tubular |
| | | | | | | | into | | | | | | | adenomas |
| | | | | | | | subserosa/ | | | | | | | |
| | | | | | | | pericolic | | | | | | | |
| | | | | | | | adipose, | | | | | | | |
| | | | | | | | no | | | | | | | |
| | | | | | | | serosal | | | | | | | |
| | | | | | | | involvement. | | | | | | | |
| | | | | | | | Gross | | | | | | | |
| | | | | | | | configuration | | | | | | | |
| | | | | | | | annular. | | | | | | | |
| 228 | 247 | III | Rectum | 5.8 | T3 | G2 to | Invasion | positive | 1/8 | N1 | negative | | MX | Hyperplastic |
| | | | | | | G3 | through | | | | | | | polyps |
| | | | | | | | muscularis | | | | | | | |
| | | | | | | | propria | | | | | | | |
| | | | | | | | to | | | | | | | |
| | | | | | | | involve | | | | | | | |
| | | | | | | | subserosal, | | | | | | | |
| | | | | | | | perirectoal | | | | | | | |
| | | | | | | | adipose, | | | | | | | |
| | | | | | | | and | | | | | | | |
| | | | | | | | serosa | | | | | | | |
| 264 | 283 | II | Ascending | 5.5 | T3 | G2 | Invasion | negative | 0/10 | N0 | negative | | M0 | Tubulovillous |
| | | | colon | | | | through | | | | | | | adenoma |
| | | | | | | | muscularis | | | | | | | with high |
| | | | | | | | propria | | | | | | | grade |
| | | | | | | | into | | | | | | | dysplasia |
| | | | | | | | subserosal | | | | | | | |
| | | | | | | | adipose | | | | | | | |
| | | | | | | | tissue. | | | | | | | |
| 266 | 285 | III | Transverse | 9 | T3 | G2 | Invades | negative | 0/15 | N1 | positive | 0.4 cm, | MX | |
| | | | colon | | | | through | | | | (Mesenteric | may | | |
| | | | | | | | muscularis | | | | deposit) | represent | | |
| | | | | | | | propria | | | | | lymph | | |
| | | | | | | | to | | | | | node | | |
| | | | | | | | involve | | | | | completely | | |
| | | | | | | | pericolonic | | | | | replaced | | |
| | | | | | | | adipose, | | | | | by tumor | | |
| | | | | | | | extends | | | | | | | |
| | | | | | | | to | | | | | | | |
| | | | | | | | serosa | | | | | | | |
| 268 | 287 | I | Cecum | 6.5 | T2 | G2 | Invades | negative | 0/12 | N0 | negative | | M0 | |
| | | | | | | | full | | | | | | | |
| | | | | | | | thickness | | | | | | | |
| | | | | | | | of | | | | | | | |
| | | | | | | | muscularis | | | | | | | |
| | | | | | | | propria, | | | | | | | |
| | | | | | | | but | | | | | | | |
| | | | | | | | mesenteric | | | | | | | |
| | | | | | | | adipose | | | | | | | |
| | | | | | | | free | | | | | | | |
| | | | | | | | of | | | | | | | |
| | | | | | | | malignancy | | | | | | | |
| 278 | 297 | III | Rectum | 4 | T3 | G2 | Invasion | positive | 7/10 | N2 | negative | | M0 | Descending |
| | | | | | | | into | | | | | | | colon |
| | | | | | | | perirectal | | | | | | | polyps, no |
| | | | | | | | adipose | | | | | | | HGD or |
| | | | | | | | tissue. | | | | | | | carcinoma |
| | | | | | | | | | | | | | | identified. |
| 295 | 314 | II | Ascending | 5.0 | T3 | G2 | Invasion | negative | 0/12 | N0 | negative | | M0 | Melanosis |
| | | | colon | | | | through | | | | | | | coli and |
| | | | | | | | muscularis | | | | | | | diverticular |
| | | | | | | | propria | | | | | | | disease. |
| | | | | | | | into | | | | | | | |
| | | | | | | | percolic | | | | | | | |
| | | | | | | | adipose | | | | | | | |
| | | | | | | | tissue. | | | | | | | |
| 339 | 358 | II | Rectosigmoid | 6 | T3 | G2 | Extends | negative | 0/6 | N0 | negative | | M0 | 1 |
| | | | | | | | into | | | | | | | hyperplastic |
| | | | | | | | perirectal | | | | | | | polyp |
| | | | | | | | fat | | | | | | | identified |
| | | | | | | | but | | | | | | | |
| | | | | | | | does | | | | | | | |
| | | | | | | | not | | | | | | | |
| | | | | | | | reach | | | | | | | |
| | | | | | | | serosa | | | | | | | |
| 341 | 360 | II | Ascending | 2 cm | T3 | G2 | Invasion | negative | 0/4 | N0 | negative | | MX | |
| | | | colon | invasive | | | through | | | | | | | |
| | | | | | | | muscularis | | | | | | | |
| | | | | | | | propria | | | | | | | |
| | | | | | | | to | | | | | | | |
| | | | | | | | involve | | | | | | | |
| | | | | | | | pericolonic | | | | | | | |
| | | | | | | | fat. | | | | | | | |
| | | | | | | | Arising | | | | | | | |
| | | | | | | | from | | | | | | | |
| | | | | | | | villous | | | | | | | |
| | | | | | | | adenoma. | | | | | | | |
| 356 | 375 | II | Sigmoid | 6.5 | T3 | G2 | Through | negative | 0/4 | N0 | negative | | M0 | |
| | | | | | | | colon | | | | | | | |
| | | | | | | | wall | | | | | | | |
| | | | | | | | into | | | | | | | |
| | | | | | | | subserosal | | | | | | | |
| | | | | | | | adipose | | | | | | | |
| | | | | | | | tissue. | | | | | | | |
| | | | | | | | No | | | | | | | |
| | | | | | | | serosal | | | | | | | |
| | | | | | | | spread | | | | | | | |
| | | | | | | | seen. | | | | | | | |
| 360 | 412 | III | Ascending | 4.3 | T3 | G2 | Invasion | positive | 1/5 | N1 | negative | | M0 | Two |
| | | | colon | | | | thru | | | | | | | mucosal |
| | | | | | | | muscularis | | | | | | | polyps |
| | | | | | | | propria | | | | | | | |
| | | | | | | | to | | | | | | | |
| | | | | | | | pericolonic | | | | | | | |
| | | | | | | | fat | | | | | | | |
| 392 | 444 | IV | Ascending | 2 | T3 | G2 | Invasion | positive | 1/6 | N1 | positive | Macrovesicular | M1 | Tumor |
| | | | colon | | | | through | | | | (Liver) | and | | arising at |
| | | | | | | | muscularis | | | | | microvesicular | | prior |
| | | | | | | | propria | | | | | steatosis | | ileocolic |
| | | | | | | | into | | | | | | | surgical |
| | | | | | | | subserosal | | | | | | | anastomosis. |
| | | | | | | | adipose | | | | | | | |
| | | | | | | | tissue, | | | | | | | |
| | | | | | | | not | | | | | | | |
| | | | | | | | serosa. | | | | | | | |
| 393 | 445 | II | Cecum | 6.0 | T3 | G2 | Cecum, | negative | 0/21 | N0 | negative | | M0 | |
| | | | | | | | invades | | | | | | | |
| | | | | | | | through | | | | | | | |
| | | | | | | | muscularis | | | | | | | |
| | | | | | | | propria | | | | | | | |
| | | | | | | | to | | | | | | | |
| | | | | | | | involve | | | | | | | |
| | | | | | | | subserosal | | | | | | | |
| | | | | | | | adipose | | | | | | | |
| | | | | | | | tissue | | | | | | | |
| | | | | | | | but | | | | | | | |
| | | | | | | | not | | | | | | | |
| | | | | | | | serosa. | | | | | | | |
| 413 | 465 | IV | Ascending | 4.8 | T3 | G2 | Invasive | negative | 0/7 | N0 | positive | adenocarcinoma | M1 | rediagnosis |
| | | | colon | | | | through | | | | (Liver) | in | | of |
| | | | | | | | muscularis | | | | | multiple | | oophorectomy |
| | | | | | | | to | | | | | slides | | path |
| | | | | | | | involve | | | | | | | to |
| | | | | | | | periserosal | | | | | | | metastatic |
| | | | | | | | fat; | | | | | | | colon |
| | | | | | | | abutting | | | | | | | cancer. |
| | | | | | | | ileocecal | | | | | | | |
| | | | | | | | junction. | | | | | | | |
| 505 | 383 | IV | | 7.5 cm | T3 | G2 | Invasion | positive | 2/17 | N1 | positive | moderately | M1 | Anatomical |
| | | | | max | | | through | | | | (Liver) | differentiated | | location |
| | | | | dim | | | muscularis | | | | | adenocarcinoma, | | of primary |
| | | | | | | | propria | | | | | consistant | | not |
| | | | | | | | involving | | | | | with | | notated in |
| | | | | | | | pericolic | | | | | primary | | report. |
| | | | | | | | adipose, | | | | | | | Evidence |
| | | | | | | | serosal | | | | | | | of chronic |
| | | | | | | | surface | | | | | | | colitis. |
| | | | | | | | uninvolved | | | | | | | |
| 517 | 395 | IV | Sigmoid | 3 | T3 | G2 | penetrates | positive | 6/6 | N2 | negative | | M0 | No |
| | | | | | | | muscularis | | | | | | | mention |
| | | | | | | | propria, | | | | | | | of distant |
| | | | | | | | involves | | | | | | | met in |
| | | | | | | | pericolonic | | | | | | | report |
| | | | | | | | fat. | | | | | | | |
| 534 | 553 | II | Ascending | 12 | T3 | G3 | Invasion | negative | 0/8 | N0 | negative | | M0 | Omentum |
| | | | colon | | | | through | | | | | | | with |
| | | | | | | | the | | | | | | | fibrosis |
| | | | | | | | muscularis | | | | | | | and fat |
| | | | | | | | propria | | | | | | | necrosis. |
| | | | | | | | involving | | | | | | | Small |
| | | | | | | | pericolic | | | | | | | bowel |
| | | | | | | | fat. | | | | | | | with acute |
| | | | | | | | Serosa | | | | | | | and |
| | | | | | | | free of | | | | | | | chronic |
| | | | | | | | tumor. | | | | | | | serositis, |
| | | | | | | | | | | | | | | focal |
| | | | | | | | | | | | | | | abscess |
| | | | | | | | | | | | | | | and |
| | | | | | | | | | | | | | | adhesions. |
| 546 | 565 | IV | Ascending | 5.5 | T3 | G2 | Invasion | positive | 6/12 | N2 | positive | metastatic | M1 | |
| | | | colon | | | | through | | | | (Liver) | adenocarcinoma | | |
| | | | | | | | muscularis | | | | | | | |
| | | | | | | | propria | | | | | | | |
| | | | | | | | extensively | | | | | | | |
| | | | | | | | through | | | | | | | |
| | | | | | | | submucosal | | | | | | | |
| | | | | | | | and | | | | | | | |
| | | | | | | | extending | | | | | | | |
| | | | | | | | to | | | | | | | |
| | | | | | | | serosa. | | | | | | | |
| 577 | 596 | II | Cecum | 11.5 | T3 | G2 | Invasion | negative | 0/58 | N0 | negative | | M0 | Appendix |
| | | | | | | | through | | | | | | | dilated |
| | | | | | | | the | | | | | | | and |
| | | | | | | | bowel | | | | | | | fibrotic, |
| | | | | | | | wall, | | | | | | | but not |
| | | | | | | | into | | | | | | | involved |
| | | | | | | | suberosal | | | | | | | by tumor |
| | | | | | | | adipose. | | | | | | | |
| | | | | | | | Serosal | | | | | | | |
| | | | | | | | surface | | | | | | | |
| | | | | | | | free | | | | | | | |
| | | | | | | | of | | | | | | | |
| | | | | | | | tumor. | | | | | | | |
| 695 | 714 | II | Cecum | 14 | T3 | G2 | extending | negative | 0/22 | N0 | negative | | MX | tubular |
| | | | | | | | through | | | | | | | adenoma |
| | | | | | | | bowel | | | | | | | and |
| | | | | | | | wall | | | | | | | hyperplstic |
| | | | | | | | into | | | | | | | polyps |
| | | | | | | | serosal | | | | | | | present, |
| | | | | | | | fat | | | | | | | moderately |
| | | | | | | | | | | | | | | differentiated |
| | | | | | | | | | | | | | | adenoma |
| | | | | | | | | | | | | | | with |
| | | | | | | | | | | | | | | mucinous |
| | | | | | | | | | | | | | | diferentiation |
| | | | | | | | | | | | | | | (% not |
| | | | | | | | | | | | | | | stated) |
| 784 | 803 | IV | Ascending | 3.5 | T3 | G3 | through | positive | 5/17 | N2 | positive | | M1 | invasive |
| | | | colon | | | | muscularis | | | | (Liver) | | | poorly |
| | | | | | | | propria | | | | | | | differentiated |
| | | | | | | | into | | | | | | | adenosquamous |
| | | | | | | | pericolic | | | | | | | carcinoma |
| | | | | | | | soft | | | | | | | |
| | | | | | | | tissues | | | | | | | |
| 786 | 805 | IV | Descending | 9.5 | T3 | G2 | through | negative | 0/12 | N0 | positive | | M1 | moderately |
| | | | colon | | | | muscularis | | | | (Liver) | | | differentiated |
| | | | | | | | propria | | | | | | | invasive |
| | | | | | | | into | | | | | | | adenocarcinoma |
| | | | | | | | pericolic | | | | | | | |
| | | | | | | | fat, | | | | | | | |
| | | | | | | | but | | | | | | | |
| | | | | | | | not at | | | | | | | |
| | | | | | | | serosal | | | | | | | |
| | | | | | | | surface | | | | | | | |
| 791 | 810 | IV | Ascending | 5.8 | T3 | G3 | through | positive | 13/25 | N2 | positive | | M1 | poorly |
| | | | colon | | | | the | | | | (Liver) | | | differentiated |
| | | | | | | | muscularis | | | | | | | invasive |
| | | | | | | | propria | | | | | | | colonic |
| | | | | | | | into | | | | | | | adenocarcinoma |
| | | | | | | | pericolic | | | | | | | |
| | | | | | | | fat | | | | | | | |
| 888 | 908 | IV | Ascending | 2.0 | T2 | G1 | into | positive | 3/21 | N0 | positive | | M1 | well-to |
| | | | colon | | | | muscularis | | | | (Liver) | | | moderately- |
| | | | | | | | propria | | | | | | | differentiated |
| | | | | | | | | | | | | | | adenocarcinoma; |
| | | | | | | | | | | | | | | this |
| | | | | | | | | | | | | | | patient has |
| | | | | | | | | | | | | | | tumors of |
| | | | | | | | | | | | | | | the |
| | | | | | | | | | | | | | | ascending |
| | | | | | | | | | | | | | | colon and |
| | | | | | | | | | | | | | | the |
| | | | | | | | | | | | | | | sigmoid |
| | | | | | | | | | | | | | | colon |
| 889 | 909 | IV | Cecum | 4.8 | T3 | G2 | through | positive | 1/4 | N1 | positive | | M1 | moderately |
| | | | | | | | muscularis | | | | (Liver) | | | differentiated |
| | | | | | | | propria | | | | | | | adenocarcinoma |
| | | | | | | | int | | | | | | | |
| | | | | | | | subserosal | | | | | | | |
| | | | | | | | tissue | | | | | | | |

[0338] Identification of Differentially Expressed Genes

[0339] cDNA probes were prepared from total RNA isolated from the patient cells described above. Since LCM provides for the isolation of specific cell types to provide a substantially homogenous cell sample, this provided for a similarly pure RNA sample.

[0340] Total RNA was first reverse transcribed into cDNA using a primer containing a T7 RNA polymerase promoter, followed by second strand DNA synthesis. cDNA was then transcribed in vitro to produce antisense RNA using the T7 promoter-mediated expression (see, e.g., Luo et al. (1999) Nature Med 5:117-122), and the antisense RNA was then converted into cDNA. The second set of cDNAs were again transcribed in vitro, using the T7 promoter, to provide antisense RNA. Optionally, the RNA was again converted into cDNA, allowing for up to a third round of T7-mediated amplification to produce more antisense RNA. Thus the procedure provided for two or three rounds of in vitro transcription to produce the final RNA used for fluorescent labeling.

[0341] Fluorescent probes were generated by first adding control RNA to the antisense RNA mix, and producing fluorescently labeled cDNA from the RNA starting material. Fluorescently labeled cDNAs prepared from the tumor RNA sample were compared to fluorescently labeled cDNAs prepared from normal cell RNA sample. For example, the cDNA probes from the normal cells were labeled with Cy3 fluorescent dye (green) and the cDNA probes prepared from the tumor cells were labeled with Cy5 fluorescent dye (red), and vice versa.

[0342] Each array used had an identical spatial layout and control spot set. Each microarray was divided into two areas, each area having an array with, on each half, twelve groupings of 32×12 spots, for a total of about 9,216 spots on each array. The two areas are spotted identically which provide for at least two duplicates of each clone per array.

[0343] Polynucleotides corresponding to the differentially expressed genes described herein for use on the arrays were obtained from both publicly available sources and from cDNA libraries generated from selected cell lines and patient tissues. PCR products of from about 0.5 kb to 2.0 kb amplified from these sources were spotted onto the array using a Molecular Dynamics Gen III spotter according to the manufacturer's recommendations. The first row of each of the 24 regions on the array had about 32 control spots, including 4 negative control spots and 8 test polynucleotides. The test polynucleotides were spiked into each sample before the labeling reaction with a range of concentrations from 2-600 pg/slide and ratios of 1:1. For each array design, two slides were hybridized with the test samples reverse-labeled in the labeling reaction. This provided for about four duplicate measurements for each clone, two of one color and two of the other, for each sample.

[0344] The differential expression assay was performed by mixing equal amounts of probes from tumor cells and normal cells of the same patient. The arrays were prehybridized by incubation for about 2 hrs at 60° C. in 5×SSC/0.2% SDS/1 mM EDTA, and then washed three times in water and twice in isopropanol. Following prehybridization of the array, the probe mixture was then hybridized to the array under conditions of high stringency (overnight at 42° C. in 50% formamide, 5×SSC, and 0.2% SDS. After hybridization, the array was washed at 55° C. three times as follows: 1) first wash in 1×SSC/0.2% SDS; 2) second wash in 0.1×SSC/0.2% SDS; and 3) third wash in 0.1×SSC.

[0345] The arrays were then scanned for green and red fluorescence using a Molecular Dynamics Generation III dual color laser-scanner/detector. The images were processed using BioDiscovery Autogene software, and the data from each scan set normalized to provide for a ratio of expression relative to normal. Data from the microarray experiments was analyzed according to the algorithms described in U.S. application Ser. No. 60/252,358, filed Nov. 20, 2000, by E. J. Moler, M. A. Boyle, and F. M. Randazzo, and entitled “Precision and accuracy in cDNA microarray data,” which application is specifically incorporated herein by reference.

[0346] The experiment was repeated, this time labeling the two probes with the opposite color in order to perform the assay in both “color directions.” Each experiment was sometimes repeated with two more slides (one in each color direction). The level fluorescence for each sequence on the array expressed as a ratio of the geometric mean of 8 replicate spots/genes from the four arrays or 4 replicate spots/gene from 2 arrays or some other permutation. The data were normalized using the spiked positive controls present in each duplicated area, and the precision of this normalization was included in the final determination of the significance of each differential. The fluorescent intensity of each spot was also compared to the negative controls in each duplicated area to determine which spots have detected significant expression levels in each sample.

[0347] A statistical analysis of the fluorescent intensities was applied to each set of duplicate spots to assess the precision and significance of each differential measurement, resulting in a p-value testing the null hypothesis that there is no differential in the expression level between the tumor and normal samples of each patient. During initial analysis of the microarrays, the hypothesis was accepted if p>10⁻³, and the differential ratio was set to 1.000 for those spots. All other spots have a significant difference in expression between the tumor and normal sample. If the tumor sample has detectable expression and the normal does not, the ratio is truncated at 1000 since the value for expression in the normal sample would be zero, and the ratio would not be a mathematically useful value (e.g., infinity). If the normal sample has detectable expression and the tumor does not, the ratio is truncated to 0.001, since the value for expression in the tumor sample would be zero and the ratio would not be a mathematically useful value. These latter two situations are referred to herein as “on/off.” Database tables were populated using a 95% confidence level (p>0.05).

[0348] The results are provided in Table 6 below. The table includes: 1) the SEQ ID NO; 2) the sample identification (Sample ID); 3) the spot identification number (“SpotID”); and 4) the percentage of patients tested in which expression levels of the gene was at least 2-fold greater in cancerous tissue than in matched normal tissue (“ColonPatients pvalcorrected 95_{—}>=2×”). The ratios of differential expression is expressed as a normalized hybridization signal associated with the tumor probe divided by the normalized hybridization signal with the normal probe. Thus, a ratio greater than 1 indicates that the gene product is increased in expression in cancerous cells relative to normal cells, while a ratio of less than 1 indicates the opposite.

TABLE 6

| | | | ColonPatients |
|---|---|---|---|
| | | Chip | pvalcorrected |
| SEQ ID NO | SampleID | Spot Id | 95_ >= 2x |
| 1 | RG:727787:Order7TM31:E07 | 29912 | 82.14 |
| 7 | M00055209C:B07 | 24297 | 30.30 |
| 9 | M00056908A:H05 | 21544 | 42.42 |
| 13 | M00057000D:E08 | 21592 | 30.30 |
| 27 | RG:1418951:Order7TM11:D12 | 33623 | 78.57 |
| 29 | RG:1418951:Order7TM11:D12 | 33623 | 78.57 |
| 22 | M00001346C:A05 | 243 | 55 |
| 22 | M00054893C:D03 | 21952 | 30 |

[0349] These data provide evidence that the genes represented by the polynucleotides having the indicated sequences are differentially expressed in colon cancer.

[0350] Those skilled in the art will recognize, or be able to ascertain, using not more than routine experimentation, many equivalents to the specific embodiments of the invention described herein. Such specific embodiments and equivalents are intended to be encompassed by the following claims.

[0351] All publications and patent applications cited in this specification are herein incorporated by reference as if each individual publication or patent application were specifically and individually indicated to be incorporated by reference. The citation of any publication is for its disclosure prior to the filing date and should not be construed as an admission that the present invention is not entitled to antedate such publication by virtue of prior invention.

[0352] Although the foregoing invention has been described in some detail by way of illustration and example for purposes of clarity of understanding, it is readily apparent to those of ordinary skill in the art in light of the teachings of this invention that certain changes and modifications may be made thereto without departing from the spirit or scope of the appended claims.

[0353] Deposit Information. A deposit of biologically pure cultures of the following viruses was made with the American Type Culture Collection, 10801 University Blvd., Manassa, Va. 20110-2209, under the provisions of the Budapest Treaty, on or before the filing date of the present application. The accession number indicated was assigned after successful viability testing, and the requisite fees were paid. Access to said cultures will be available during pendency of the patent application to one determined by the Commissioner to be entitled to such under 37 C.F.R. §1.14 and 35 U.S.C. §122. All restriction on availability of said cultures to the public will be irrevocably removed upon the granting of a patent based upon the application. Moreover, the designated deposits will be maintained for a period of thirty (30) years from the date of deposit, or for five (5) years after the last request for the deposit; or for the enforceable life of the U.S. patent, whichever is longer. Should a culture become nonviable or be inadvertently destroyed, or, in the case of plasmid-containing strains, lose its plasmid, it will be replaced with a viable culture(s) of the same taxonomic description.

[0354] These deposits are provided merely as a convenience to those of skill in the art, and are not an admission that a deposit is required. The nucleic acid sequences of these plasmids, as well as the amino sequences of the polypeptides encoded thereby, are controlling in the event of any conflict with the description herein. A license may be required to make, use, or sell the deposited materials, and no such license is hereby granted.

[0355] In addition, pools of selected clones, as well as libraries containing specific clones, were assigned an “ES” number (internal reference) and deposited with the ATCC. Table 7 below provides the ATCC Accession Nos. of the deposited clones, all of which were deposited on or before the filing date of the application.

TABLE 7
Pools of Clones and Libraries Deposited with the ATCC

| Sequence Name | Clones | CMCC | ATCC |
|---|---|---|---|
| SK1 | SK-1 | 5162 | PTA-1360 |
| SK2 | SK-2 | 5163 | PTA-1361 |
| SK5 | SK-5 | 5164 | PTA-1362 |
| 1665 short | 1665 short | 5165 | PTA-1363 |
| 1665 long | 1665 long | 5166 | PTA-1363 |
| sk19 | SK-19 | 5167 | PTA-1364 |
| Junc2 | Junc2-6 | 5168 | PTA-1365 |
| XD4 | XD4b | 5169 | PTA-1366 |
| XD1 | XD1b | 5170 | PTA-1367 |
| XD7 | XD7c | 5171 | PTA-1368 |
| XD10 | XD10b | 5172 | PTA-1369 |
| XD11 | XD11b | 5173 | PTA-1370 |
| Junc4 | Junc4-2 | 5174 | PTA-1371 |

CMCC refers to applicant's internal reference number.

[0356] Retrieval of Individual Clones from Deposit of Pooled Clones. Where the ATCC deposit is composed of a pool of cDNA clones or a library of cDNA clones, the deposit was prepared by first transfecting each of the clones into separate bacterial cells. The clones in the pool or library were then deposited as a pool of equal mixtures in the composite deposit. Particular clones can be obtained from the composite deposit using methods well known in the art. For example, a bacterial cell containing a particular clone can be identified by isolating single colonies, and identifying colonies containing the specific clone through standard colony hybridization techniques, using an oligonucleotide probe or probes designed to specifically hybridize to a sequence of the clone insert (e.g., a probe based upon unmasked sequence of the encoded polynucleotide having the indicated SEQ ID NO). The probe should be designed to have a Tₘ of approximately 80° C. (assuming 2° C. for each A or T and 4° C. for each G or C). Positive colonies can then be picked, grown in culture, and the recombinant clone isolated. Alternatively, probes designed in this manner can be used to PCR to isolate a nucleic acid molecule from the pooled clones according to methods well known in the art, e.g., by purifying the cDNA from the deposited culture pool, and using the probes in PCR reactions to produce an amplified product having the corresponding desired polynucleotide sequence.

### Example 13

### ATCC Deposits

[0357] The following plasmids were deposited as a bacterial culture with plasmid cDNA on Sep. 25, 1998 with the American Type Culture Collection, 1301 Parklawn Drive, Rockville, Md., USA (ATCC) as ATCC accession no. 98896:

[0358] 1) Clone HX2134-4 (containing an insert corresponding to SEQ ID NO:128),

[0359] 2) Clone HX2144-1 (containing an insert corresponding to SEQ ID NO: 129);

[0360] 3) Clone HX2145-3 (containing an insert corresponding to SEQ ID NO: 130);

[0361] 4) Clone HX2162-3 (containing an insert corresponding to SEQ ID NO: 131);

[0362] 5) Clone HX2166-6 (containing an insert corresponding to SEQ ID NO: 132); and

[0363] 6) Clone HX2192-1 (containing an insert corresponding to SEQ ID NO:133).

[0364] The deposit was made under the conditions specified by the Budapest Treaty on the international recognition of the deposit of microorganisms (Budapest Treaty). Constructs and polynucleotides sequences equivalent to and/or substantially equivalent to the deposited material are also considered to be within the scope of this invention. Availability of the deposited material is not to be construed as a license to practice the invention in contravention of the rights granted under the authority of any government in accordance with its patent laws.

[0365] Each of the above clones was transfected into separate bacterial cells, and were deposited as a pool of equal mixtures of all six clones in this composite deposit. Each clone can be removed from the vector in which it was deposited by EcoRI to produce the appropriately sized 0.5 kb-1.0 kb fragment for the clone. Particular clones can be obtained from the composite deposit using methods well known in the art. For example, a bacterial cell containing a particular clone can be identified by isolating single colonies on an appropriate bacterial media containing ampicillin, and identifying colonies containing the specific clone through standard colony hybridization techniques, using an oligonucleotide probe or probes designed to specifically hybridize to a sequence of one of SEQ ID NOS:128-133. The probe should be designed to have a Tₘ of approximately 80 EC (assuming 2 EC for each A or T and 4 EC for each G or C). Positive colonies can then be picked, grown in culture, and the recombinant clone isolated.

### Example 14

[0366] A family was identified that had several members who had been diagnosed with pancreatic cancer. The family members also have a form of diabetes. The pathological features of disease in the family included progression from normal to metaplasia to dysplasia to cancer. Tissues were obtained from a member of the family diagnosed with pancreatic cancer and from a member of the family diagnosed with dysplasia of pancreatic cells, and primary cultures of ductal cells prepared according to methods well known in the art. Tissue was also obtained from an unrelated person who was diagnosed with pancreatitis, and from an unrelated person who had a normal pancreas, and primary cultures of ductal cells prepared according to methods well known in the art.

[0367] The Genomyx HIEROGLYPH™ mRNA profile kit for differential display analysis was used according to the manufacturer's instructions to identify genes that are differentially expressed in the various samples relative to one another. Briefly, mRNA was isolated from the primary ductal cell cultures, and subjected to reverse transcriptase polymerase chain reaction (PCR). The resulting cDNA was subjected to a differential display in which the cDNA from each of the samples were compared on a gel.

[0368] The cDNA fragment pattern in each sample was manually compared to the cDNA fragment pattern in every other sample on the gel. Those bands representing differentially expressed gene products (e.g., bands associated with relatively more or less cDNA in one sample relative to another) were cut from the gel, amplified, cloned, and sequenced. The following polynucleotide sequences (SEQ ID NOS:128-133) of cDNA fragments isolated from six such differentially displayed cDNA fragments were identified as being differentially regulated in pancreatic disease.

TABLE 8
Results of Differential Display

| | | Sequence | |
|---|---|---|---|
| SEQ ID | Clone | Length | |
| NO. | Name | (bp) | Results |
| 128 | HX2134-4 | 676 | Expression decreased in dysplasia only |
| 129 | HX2144-1 | 544 | Expression increased in cancer only |
| 130 | HX2145-3 | 432 | Expression decreased in dysplasia only |
| 131 | HX2162-3 | 493 | Expression increased in dysplasia only |
| 132 | HX2166-6 | 418 | Expression increased in dysplasia only |
| 133 | HX2192-1 | 1063 | Expression decreased in dysplasia and |
| | | | cancer |

[0369] The identification of these differentially expressed polynucleotides, as well as the correlation of the relative levels of expression of the represented differentially expressed genes with the disease states of pancreatic cancer and dysplasia, indicates that the gene products of the differentially expressed polynucleotides and genes can serve as markers of these disease states, where the markers can be used either singly or in combination with one another. Examination of expression of one or more of these differentially expressed polynucleotides can thus be used in classifying the cell from which the polynucleotides are derived as, for example, cancerous, dysplastic, or normal, and can further be used in diagnosis of the subject from whom the cell sample was derived. Use of all or a subset of the differentially expressed polynucleotides as markers will increase the sensitivity and the accuracy of the diagnosis.

### Example 15

### Sequencing and Analysis of Differentially Expressed Polynucleotides

[0370] The sequences of the differentially expressed polynucleotides identified in Example 1 (SEQ ID NOS:128-133) were used as query sequences in the GenBank and dbEST public databases to identify possible homologous sequences. The search was performed using the BLAST program, with default settings. All six sequences were novel, i.e., no sequence present in the databases searched contained a sequence having the contiguous nucleotide sequence set forth in any of SEQ ID NOS:128-133. Moreover, each of the polynucleotides contained stretches of contiguous nucleotides for which no homologous sequence was identified. A summary of these wholly unique sequences, referred to herein as identifying sequences, is provided in Table 9 below.

TABLE 9
Identifying sequences of the differentially expressed genes of
the invention.

| | Identifying Sequences |
|---|---|
| SEQ ID | (numbering refers to nucleotide |
| NO: | position in Sequence Listing) |
| 128 | 1-304; 533-571 |
| 129 | 1-62; 102-139; 183-544 |
| 130 | 1-41; 62-182; 216-281; 319-432 |
| 131 | 1-13; 32-137; 156-236; 255-429; 453-493 |
| 132 | 1-101; 408-418 |
| 133 | 327-444; 640-997; 1018-1063 |

[0371] The identifying sequences above represent exemplary minimal, contiguous nucleotides sequences of the differentially expressed polynucleotides than can be used in identification or detection of the corresponding differentially expressed genes described herein.

### Example 16

### Fabricating a DNA Array Using Polynucleotides Differentially Expressed in Pancreatic Cells

[0372] A DNA array is made by spotting DNA fragments onto glass microscope slides that are pretreated with poly-L-lysine. Spotting onto the array is accomplished by a robotic arrayer. The DNA is cross-linked to the glass by ultraviolet irradiation, and the free poly-L-lysine groups are blocked by treatment with 0.05% succinic anhydride, 50% 1-methyl-2-pyrrolidinone and 50% borate buffer.

[0373] The spots on the array are oligonucleotides synthesized on an ABI automated synthesizer. Each spot is one of the polynucleotides of SEQ ID NOS:128-133, each of which correspond to a gene that is differentially expressed in pancreatic cells according to varying disease states (e.g., overexpressed or underexpressed in cancerous, dysplastic, pancreatitis, and/or diabetic pancreatic cells). The polynucleotides may be present on the array in any of a variety of combinations or subsets. Some internal standards and negative control spots including non-differentially expressed sequences and/or bacterial controls are included.

[0374] mRNA from patient samples is isolated, the mRNA used to produce cDNA, amplified and subsequently labeled with fluorescent nucleotides as follows: isolated mRNA is added to a standard PCR reaction containing primers (100 pmoles each), 250 uM nucleotides, and 5 Units of Taq polymerase (Perkin Elmer). In addition, fluorescent nucleotides (Cy3-dUTP (green fluorescence) or Cy5-dUTP (red fluorescence), sold by Amersham) are added to a final concentration of 60 uM. The reaction is carried out in a Perkin Elmer thermocycler (PE9600) for 30 cycles using the following cycle profile: 92° C. for 30 seconds, 58° C. for 30 seconds, and 72° C. for 2 minutes. Unincorporated fluorescent nucleotides are removed by size exclusion chromatography (Microcon-30 concentration devices, sold by Amicon).

[0375] Buffer replacement, removal of small nucleotides and primers and sample concentration is accomplished by ultrafiltration over an Amicon microconcentrator-30 (mwco=30,000 Da) with three changes of 0.45 ml TE. The sample is reduced to 5 μl and supplemented with 1.4 μl 20×SSC and 5 μg yeast tRNA. Particles are removed from this mixture by filtration through a pre-wetted 0.45μ microspin filter (Ultrafree-MC, Millipore, Bedford, Ma.). SDS is added to a 0.28% final concentration. The fluorescently-labeled cDNA mixture is then heated to 98° C. for 2 min., quickly cooled and applied to the DNA array on a microscope slide. Hybridization proceeds under a coverslip, and the slide assembly is kept in a humidified chamber at 65° C. for 15 hours.

[0376] The slide is washed briefly in 1×SSC and 0.03% SDS, followed by a wash in 0.06% SSC. The slide is kept in a humidified chamber until fluorescence scanning was done. Fluorescence scanning and data acquisition are then accomplished using any of a variety of suitable methods well known in the art. For example, fluorescence scanning is set for 20 microns/pixel and two readings are taken per pixel. Data for channel 1 is set to collect fluorescence from Cy3 with excitation at 520 nm and emission at 550-600 nm. Channel 2 collects signals excited at 647 nm and emitted at 660-705 nm, appropriate for Cy5. No neutral density filters are applied to the signal from either channel, and the photomultiplier tube gain is set to 5. Fine adjustments are then made to the photomultiplier gain so that signals collected from the two spots are equivalent.

[0377] The data acquired from the scan of the array is then converted to any suitable form for analysis. For example, the data may be analyzed using a computer system, and the data may be displayed in a pictoral format on a computer screen, where the display shows the array as a collection of spots, each spot corresponding to a location of a different polynucleotide on the array. The spots vary in brightness according to the amount of fluorescent probe associated with the spot, which in turn is correlated with an amount of hybridized cDNA in the sample. The relative brightness of the spots on the array can be compared with one another to determine their relative intensities, either qualitatively or quantitatively.

[0378] The display of spots on the array, along with their relative brightness, provides a test sample pattern. The test sample pattern can be then compared with reference array patterns associated with positive and negative control samples on the same array, e.g., an array having polynucleotides in substantially the same locations as the array used with the test sample. The reference array patterns used in the comparison can be array patterns generated using samples from normal pancreas cells, cancerous pancreas cells, pancreatitis-associated pancreas cells, diabetic pancreas cells, and the like. A substantial or significant match between the test array pattern and a reference array pattern is indicative of a disease state of the patient from whom the test sample was obtained.

### Example 17

### Source of Biological Materials and Overview of Novel Polynucleotides Expressed by the Biological Materials

[0379] Candidate polynucleotides that may represent novel polynucleotides were obtained from cDNA libraries generated from selected cell lines and patient tissues. In order to obtain the candidate polynucleotides, mRNA was isolated from several selected cell lines and patient tissues, and used to construct cDNA libraries. The cells and tissues that served as sources for these cDNA libraries are summarized in Table 10 below.

[0380] Human colon cancer cell line Km12L4-A (Morikawa, et al., Cancer Research (1988) 48:6863) is derived from the KM12C cell line. The KM12C cell line (Morikawa et al. Cancer Res. (1988) 48:1943-1948), which is poorly metastatic (low metastatic) was established in culture from a Dukes' stage B2 surgical specimen (Morikawa et al. Cancer Res. (1988) 48:6863). The KM12L4-A is a highly metastatic subline derived from KM12C (Yeatman et al. Nucl. Acids. Res. (1995) 23:4007; Bao-Ling et al. Proc. Annu. Meet. Am. Assoc. Cancer. Res. (1995) 21:3269). The KM12C and KM12C-derived cell lines (e.g., KM12L4, KM12L4-A, etc.) are well-recognized in the art as a model cell line for the study of colon cancer (see, e.g., Moriakawa et al., supra; Radinsky et al. Clin. Cancer Res. (1995) 1:19; Yeatman et al., (1995) supra; Yeatman et al. Clin. Exp. Metastasis (1996) 14:246).

[0381] The MDA-MB-231 cell line (Brinkley et al. Cancer Res. (1980) 40:3118-3129) was originally isolated from pleural effusions (Cailleau, J. Natl. Cancer. Inst. (1974) 53:661), is of high metastatic potential, and forms poorly differentiated adenocarcinoma grade II in nude mice consistent with breast carcinoma. The MCF7 cell line was derived from a pleural effusion of a breast adenocarcinoma and is non-metastatic. The MV-522 cell line is derived from a human lung carcinoma and is of high metastatic potential. The UCP-3 cell line is a low metastatic human lung carcinoma cell line; the MV-522 is a high metastatic variant of UCP-3. These cell lines are well-recognized in the art as models for the study of human breast and lung cancer (see, e.g., Chandrasekaran et al., Cancer Res. (1979) 39:870 (MDA-MB-231 and MCF-7); Gastpar et al., J Med Chem (1998) 41:4965 (MDA-MB-231 and MCF-7); Ranson et al., Br J Cancer (1998) 77:1586 (MDA-MB-231 and MCF-7); Kuang et al., Nucleic Acids Res (1998) 26:1116 (MDA-MB-231 and MCF-7); Varki et al., Int J Cancer (1987) 40:46 (UCP-3); Varki et al., Tumour Biol. (1990) 11:327; (MV-522 and UCP-3); Varki et al., Anticancer Res. (1990) 10:637; (MV-522); Kelner et al., Anticancer Res (1995) 15:867 (MV-522); and Zhang et al., Anticancer Drugs (1997) 8:696 (MV522)).

[0382] The samples of libraries 15-20 are derived from two different patients (UC#2, and UC#3). The bFGF-treated HMVEC were prepared by incubation with bFGF at 10 ng/ml for 2 hrs; the VEGF-treated HMVEC were prepared by incubation with 20 ng/ml VEGF for 2 hrs. Following incubation with the respective growth factor, the cells were washed and lysis buffer added for RNA preparation.

[0383] GRRpz was derived from normal prostate epithelium. The WOca cell line is a Gleason Grade 4 cell line.

[0384] The source materials for generating the normalized prostate libraries of libraries 25 and 26 were cryopreserved prostate tumor tissue from a patient with Gleason grade 3+3 adenocarcinoma and matched normal prostate biopsies from a pool of at-risk subjects under medical surveillance. The source materials for generating the normalized prostate libraries of libraries 30 and 31 were cryopreserved prostate tumor tissue from a patient with Gleason grade 4+4 adenocarcinoma and matched normal prostate biopsies from a pool of at-risk subjects under medical surveillance.

[0385] The source materials for generating the normalized breast libraries of libraries 27, 28 and 29 were cryopreserved breast tissue from a primary breast tumor (infiltrating ductal carcinoma)(library 28), from a lymph node metastasis (library 29), or matched normal breast biopsies from a pool of at-risk subjects under medical surveillance. In each case, prostate or breast epithelia were harvested directly from frozen sections of tissue by laser capture microdissection (LCM, Arcturus Enginering Inc., Mountain View, Calif.), carried out according to methods well known in the art (see, Simone et al. Am J Pathol. 156(2):445-52 (2000)), to provide substantially homogenous cell samples.

TABLE 10
Description of cDNA Libraries

| | | Number |
|---|---|---|
| Library | | of Clones in |
| (lib#) | Description | Library |
| 0 | Artificial library composed of deselected clones (clones with | 673 |
| | no associated variant or cluster) | |
| 1 | Human Colon Cell Line Km12 L4: High Metastatic Potential | 308731 |
| | (derived from Km12C) | |
| 2 | Human Colon Cell Line Km12C: Low Metastatic Potential | 284771 |
| 3 | Human Breast Cancer Cell Line MDA-MB-231: High | 326937 |
| | Metastatic Potential; micro-mets in lung | |
| 4 | Human Breast Cancer Cell Line MCF7: Non Metastatic | 318979 |
| 8 | Human Lung Cancer Cell Line MV-522: High Metastatic | 223620 |
| | Potential | |
| 9 | Human Lung Cancer Cell Line UCP-3: Low Metastatic | 312503 |
| | Potential | |
| 12 | Human microvascular endothelial cells (HMEC) - | 41938 |
| | UNTREATED (PCR (OligodT) cDNA library) | |
| 13 | Human microvascular endothelial cells (HMEC) - bFGF | 42100 |
| | TREATED (PCR (OligodT) cDNA library) | |
| 14 | Human microvascular endothelial cells (HMEC) - VEGF | 42825 |
| | TREATED (PCR (OligodT) cDNA library) | |
| 15 | Normal Colon - UC#2 Patient (MICRODISSECTED PCR | 282722 |
| | (OligodT) cDNA library) | |
| 16 | Colon Tumor - UC#2 Patient (MICRODISSECTED PCR | 298831 |
| | (OligodT) cDNA library) | |
| 17 | Liver Metastasis from Colon Tumor of UC#2 Patient | 303467 |
| | (MICRODISSECTED PCR (OligodT) cDNA library) | |
| 18 | Normal Colon - UC#3 Patient (MICRODISSECTED PCR | 36216 |
| | (OligodT) cDNA library) | |
| 19 | Colon Tumor - UC#3 Patient (MICRODISSECTED PCR | 41388 |
| | (OligodT) cDNA library) | |
| 20 | Liver Metastasis from Colon Tumor of UC#3 Patient | 30956 |
| | (MICRODISSECTED PCR (OligodT) cDNA library) | |
| 21 | GRRpz Cells derived from normal prostate epithelium | 164801 |
| 22 | WOca Cells derived from Gleason Grade 4 prostate cancer | 162088 |
| | epithelium | |
| 23 | Normal Lung Epithelium of Patient #1006 | 306198 |
| | (MICRODISSECTED PCR (OligodT) cDNA library) | |
| 24 | Primary tumor, Large Cell Carcinoma of Patient #1006 | 309349 |
| | (MICRODISSECTED PCR (OligodT) cDNA library) | |
| 25 | Normal Prostate Epithelium from Patient IF97-26811 | 279444 |
| 26 | Prostate Cancer Epithelium Gleason 3 + 3 Patient IF97-26811 | 269406 |
| 27 | Normal Breast Epithelium from Patient 515 | 239494 |
| 28 | Primary Breast tumor from Patient 515 | 259960 |
| 29 | Lymph node metastasis from Patient 515 | 326786 |
| 30 | Normal Prostate Epithelium from Chiron Patient ID 884 | 298431 |
| 31 | Prostate Cancer Epithelium (Gleason 4 + 4) from Chiron Patient | 331941 |
| | ID 884 | |

[0386] Characterization of Sequences in the Libraries

[0387] After using the software program Phred (ver 0.000925.c, Green and Weing, ©11993-2000) to select those polynucleotides having the best quality sequence, the polynucleotides were compared against the public databases to identify any homologous sequences. The sequences of the isolated polynucleotides were first masked to eliminate low complexity sequences using the RepeatMasker masking program, publicly available through a web site supported by the University of Washington (See also Smit, A. F. A. and Green, P., unpublished results). Generally, masking does not influence the final search results, except to eliminate sequences of relatively little interest due to their low complexity, and to eliminate multiple “hits” based on similarity to repetitive regions common to multiple sequences, e.g., Alu repeats.

[0388] The remaining sequences were then used in a homology search of the GenBank database using the TeraBLAST program (TimeLogic, Crystal Bay, Nev.). TeraBLAST is a version of the publicly available BLAST search algorithm developed by the National Center for Biotechnology, modified to operate at an accelerated speed with increased sensitivity on a specialized computer hardware platform. The program was run with the default parameters recommended by TimeLogic to provide the best sensitivity and speed for searching DNA and protein sequences. Sequences that exhibited greater than 70% overlap, 99% identity, and a p value of less than 1×10e-40 were discarded. Sequences from this search also were discarded if the inclusive parameters were met, but the sequence was ribosomal or vector-derived.

[0389] The resulting sequences from the previous search were classified into three groups (1, 2 and 3 below) and searched in a TeraBLASTX vs. NRP (non-redundant proteins) database search: (1) unknown (no hits in the GenBank search), (2) weak similarity (greater than 45% identity and p value of less than 1×10e-5), and (3) high similarity (greater than 60% overlap, greater than 80% identity, and p value less than 1×10e-5). Sequences having greater than 70% overlap, greater than 99% identity, and p value of less than 1×10e-40 were discarded.

[0390] The remaining sequences were classified as unknown (no hits), weak similarity, and high similarity (parameters as above). Two searches were performed on these sequences. First, a TeraBLAST vs. EST database search was performed and sequences with greater than 99% overlap, greater than 99% similarity and a p value of less than 1×10e-40 were discarded. Sequences with a p value of less than 1×10e-65 when compared to a database sequence of human origin were also excluded. Second, a TeraBLASTN vs. Patent GeneSeq database was performed and sequences having greater than 99% identity, p value less than 1×10e-40, and greater than 99% overlap were discarded.

[0391] The remaining sequences were subjected to screening using other rules and redundancies in the dataset. Sequences with a p value of less than 1×10e-111 in relation to a database sequence of human origin were specifically excluded. The final result provided the sequences listed as SEQ ID NOS:134-1352 in the accompanying Sequence Listing and summarized in Table 11. Each identified polynucleotide represents sequence from at least a partial mRNA transcript.

TABLE 11

| SEQ | | | | |
|---|---|---|---|---|
| ID | CLUSTER | SEQ NAME | CLONE ID | LIBRARY |
| 134 | 357367 | 3538.O24.GZ43_504925 | M00084399B:E05 | chiron(cc187-NormBPHProstate) |
| 135 | 725997 | 3538.P11.GZ43_504718 | M00084400A:B09 | chiron(cc187-NormBPHProstate) |
| 136 | 645986 | 3541.A04.GZ43_504975 | M00084406A:B03 | chiron(cc187-NormBPHProstate) |
| 137 | 407828 | 3541.A05.GZ43_504991 | M00084407A:H09 | chiron(cc187-NormBPHProstate) |
| 138 | 649117 | 3541.A16.GZ43_505167 | M00084421C:B11 | chiron(cc187-NormBPHProstate) |
| 139 | 424678 | 3541.A23.GZ43_505279 | M00084431C:G08 | chiron(cc187-NormBPHProstate) |
| 140 | 854288 | 3541.B04.GZ43_504976 | M00084406C:A01 | chiron(cc187-NormBPHProstate) |
| 141 | 639901 | 3541.B17.GZ43_505184 | M00084424A:G07 | chiron(cc187-NormBPHProstate) |
| 142 | 842265 | 3538.G08.GZ43_504661 | M00084379D:A05 | chiron(cc187-NormBPHProstate) |
| 143 | 557717 | 3538.G17.GZ43_504805 | M00084380C:C09 | chiron(cc187-NormBPHProstate) |
| 144 | 459967 | 3538.G19.GZ43_504837 | M00084380D:B07 | chiron(cc187-NormBPHProstate) |
| 145 | 505750 | 3538.G22.GZ43_504885 | M00084381C:A05 | chiron(cc187-NormBPHProstate) |
| 146 | 1053564 | 3538.H05.GZ43_504614 | M00084382A:D06 | chiron(cc187-NormBPHProstate) |
| 147 | 542301 | 3538.H21.GZ43_504870 | M00084383B:A11 | chiron(cc187-NormBPHProstate) |
| 148 | 21446 | 3538.I08.GZ43_504663 | M00084385A:D02 | chiron(cc187-NormBPHProstate) |
| 149 | 1140418 | 3538.I13.GZ43_504743 | M00084385B:D03 | chiron(cc187-NormBPHProstate) |
| 150 | 530453 | 3538.J22.GZ43_504888 | M00084388A:G03 | chiron(cc187-NormBPHProstate) |
| 151 | 1204782 | 3538.K12.GZ43_504729 | M00084389A:F12 | chiron(cc187-NormBPHProstate) |
| 152 | 863475 | 3538.K23.GZ43_504905 | M00084390B:H04 | chiron(cc187-NormBPHProstate) |
| 153 | 452124 | 3538.L16.GZ43_504794 | M00084391B:D06 | chiron(cc187-NormBPHProstate) |
| 154 | 650520 | 3538.M02.GZ43_504571 | M00084392C:D03 | chiron(cc187-NormBPHProstate) |
| 155 | 1117771 | 3538.M05.GZ43_504619 | M00084392C:G06 | chiron(cc187-NormBPHProstate) |
| 156 | 434074 | 3538.M08.GZ43_504667 | M00084393A:G07 | chiron(cc187-NormBPHProstate) |
| 157 | 866609 | 3538.N20.GZ43_504860 | M00084396B:B03 | chiron(cc187-NormBPHProstate) |
| 158 | 945247 | 3538.O07.GZ43_504653 | M00084397D:A09 | chiron(cc187-NormBPHProstate) |
| 159 | 1053623 | 3541.E11.GZ43_505091 | M00084415C:C05 | chiron(cc187-NormBPHProstate) |
| 160 | 722878 | 3541.E14.GZ43_505139 | M00084419C:A09 | chiron(cc187-NormBPHProstate) |
| 161 | 1226493 | 3541.E15.GZ43_505155 | M00084420C:D03 | chiron(cc187-NormBPHProstate) |
| 162 | 812031 | 3541.G17.GZ43_505189 | M00084423C:G11 | chiron(cc187-NormBPHProstate) |
| 163 | 725997 | 3541.H14.GZ43_505142 | M00084420A:G02 | chiron(cc187-NormBPHProstate) |
| 164 | 1191547 | 3541.I15.GZ43_505159 | M00084420D:C07 | chiron(cc187-NormBPHProstate) |
| 165 | 21370 | 3541.I17.GZ43_505191 | M00084423D:B05 | chiron(cc187-NormBPHProstate) |
| 166 | 418320 | 3541.I18.GZ43_505207 | M00084424D:G07 | chiron(cc187-NormBPHProstate) |
| 167 | 24580 | 3541.J19.GZ43_505224 | M00084427B:D01 | chiron(cc187-NormBPHProstate) |
| 168 | 647587 | 3541.K09.GZ43_505065 | M00084413C:A11 | chiron(cc187-NormBPHProstate) |
| 169 | 1225989 | 3541.L19.GZ43_505226 | M00084427C:D04 | chiron(cc187-NormBPHProstate) |
| 170 | 1079863 | 3541.M02.GZ43_504955 | M00084403D:D04 | chiron(cc187-NormBPHProstate) |
| 171 | 1136803 | 3541.M07.GZ43_505035 | M00084410C:F10 | chiron(cc187-NormBPHProstate) |
| 172 | 528281 | 3541.M18.GZ43_505211 | M00084425A:A01 | chiron(cc187-NormBPHProstate) |
| 173 | 660907 | 3541.O04.GZ43_504989 | M00084406B:C03 | chiron(cc187-NormBPHProstate) |
| 174 | 402588 | 3541.O13.GZ43_505133 | M00084418D:A04 | chiron(cc187-NormBPHProstate) |
| 175 | 947168 | 3541.O23.GZ43_505293 | M00084432B:C05 | chiron(cc187-NormBPHProstate) |
| 176 | 1223948 | 3541.P05.GZ43_505006 | M00084408D:E06 | chiron(cc187-NormBPHProstate) |
| 177 | 426138 | 3541.P22.GZ43_505278 | M00084431C:B02 | chiron(cc187-NormBPHProstate) |
| 178 | 1037887 | 3544.A09.GZ43_505439 | M00084447D:F03 | chiron(cc187-NormBPHProstate) |
| 179 | 468334 | 3544.A13.GZ43_505503 | M00084454A:G08 | cbiron(cc187-NormBPHProstate) |
| 180 | 1140409 | 3544.A14.GZ43_505519 | M00084456A:H04 | chiron(cc187-NormBPHProstate) |
| 181 | 555726 | 3544.A17.GZ43_505567 | M00084463A:B07 | chiron(cc187-NormBPHProstate) |
| 182 | 726922 | 3544.B02.GZ43_505328 | M00084437C:G05 | chiron(cc187-NormBPHProstate) |
| 183 | 402516 | 3544.B09.GZ43_505440 | M00084448B:D11 | chiron(cc187-NormBPHProstate) |
| 184 | 812031 | 3544.B18.GZ43_505584 | M00084467A:D06 | chiron(cc187-NormBPHProstate) |
| 185 | 448177 | 3544.E05.GZ43_505379 | M00084441D:E09 | chiron(cc187-NormBPHProstate) |
| 186 | 505750 | 3544.E18.GZ43_505587 | M00084466B:E01 | chiron(cc187-NormBPHProstate) |
| 187 | 508322 | 3544.F06.GZ43_505396 | M00084443C:H06 | chiron(cc187-NormBPHProstate) |
| 188 | 1224072 | 3544.F16.GZ43_505556 | M00084461C:D06 | chiron(cc187-NormBPHProstate) |
| 189 | 801 | 3544.G06.GZ43_505397 | M00084443A:E10 | chiron(cc187-NormBPHProstate) |
| 190 | 748101 | 3544.G10.GZ43_505461 | M00084449A:D09 | chiron(cc187-NormBPHProstate) |
| 191 | 1224107 | 3544.G11.GZ43_505477 | M00084450C:A09 | chiron(cc187-NormBPHProstate) |
| 192 | 1226845 | 3544.G12.GZ43_505493 | M00084452B:F07 | chiron(cc187-NormBPHProstate) |
| 193 | 1073767 | 3544.H03.GZ43_505350 | M00084439B:A08 | chiron(cc187-NormBPHProstate) |
| 194 | 1224752 | 3544.H15.GZ43_505542 | M00084459A:F10 | chiron(cc187-NormBPHProstate) |
| 195 | 1052480 | 3544.H24.GZ43_505686 | M00084434B:E06 | chiron(cc187-NormBPHProstate) |
| 196 | 245031 | 3544.I07.GZ43_505415 | M00084444D:F09 | chiron(cc187-NormBPHProstate) |
| 197 | 494499 | 3544.I15.GZ43_505543 | M00084458A:G06 | chiron(cc187-NormBPHProstate) |
| 198 | 1138593 | 3544.I20.GZ43_505623 | M00084469A:C09 | chiron(cc187-NormBPHProstate) |
| 199 | 1139691 | 3544.J04.GZ43_505368 | M00084441B:E05 | chiron(cc187-NormBPHProstate) |
| 200 | 790693 | 3544.J11.GZ43_505480 | M00084451D:A03 | chiron(cc187-NormBPHProstate) |
| 201 | 1117003 | 3544.J13.GZ43_505512 | M00084455D:B03 | chiron(cc187-NormBPHProstate) |
| 202 | 844740 | 3544.J23.GZ43_505672 | M00084475B:D03 | chiron(cc187-NormBPHProstate) |
| 203 | 452564 | 3544.K16.GZ43_505561 | M00084460D:B04 | chiron(cc187-NormBPHProstate) |
| 204 | 862823 | 3544.L11.GZ43_505482 | M00084451D:F06 | chiron(cc187-NormBPHProstate) |
| 205 | 19367 | 3544.L13.GZ43_505514 | M00084455D:G03 | chiron(cc187-NormBPHProstate) |
| 206 | 1194656 | 3544.M06.GZ43_505403 | M00084443B:C02 | chiron(cc187-NormBPHProstate) |
| 207 | 1224879 | 3544.M10.GZ43_505467 | M00084449B:C09 | chiron(cc187-NormBPHProstate) |
| 208 | 454904 | 3544.N07.GZ43_505420 | M00084446A:A05 | chiron(cc187-NormBPHProstate) |
| 209 | 676665 | 3544.N12.GZ43_505500 | M00084453D:B12 | chiron(cc187-NormBPHProstate) |
| 210 | 542825 | 3544.N19.GZ43_505612 | M00084468C:E07 | chiron(cc187-NormBPHProstate) |
| 211 | 411960 | 3544.O03.GZ43_505357 | M00084438D:H04 | chiron(cc187-NormBPHProstate) |
| 212 | 936795 | 3544.O10.GZ43_505469 | M00084449C:C01 | chiron(cc187-NormBPHProstate) |
| 213 | 1283437 | 3544.O15.GZ43_505549 | M00084458B:G05 | chiron(cc187-NormBPHProstate) |
| 214 | 402150 | 3544.O20.GZ43_505629 | M00084469B:F08 | chiron(cc187-NormBPHProstate) |
| 215 | 454733 | 3544.P18.GZ43_505598 | M00084468A:A09 | chiron(cc187-NormBPHProstate) |
| 216 | 1211032 | 3547.A04.GZ43_505743 | M00084483A:C06 | chiron(cc187-NormBPHProstate) |
| 217 | 452763 | 3547.A11.GZ43_505855 | M00084493A:E03 | chiron(cc187-NormBPHProstate) |
| 218 | 528281 | 3547.A24.GZ43_506063 | M00084475C:G11 | chiron(cc187-NormBPHProstate) |
| 219 | 1136803 | 3547.C05.GZ43_505761 | M00084484C:B11 | chiron(cc187-NormBPHProstate) |
| 220 | 454826 | 3547.C17.GZ43_505953 | M00084500D:B11 | chiron(cc187-NormBPHProstate) |
| 221 | 1054807 | 3547.C23.GZ43_506049 | M00084510D:D05 | chiron(cc187-NormBPHProstate) |
| 222 | 726386 | 3547.D19.GZ43_505986 | M00084504C:F05 | chiron(cc187-NormBPHProstate) |
| 223 | 1223705 | 3547.D23.GZ43_506050 | M00084511D:A02 | chiron(cc187-NormBPHProstate) |
| 224 | 398439 | 3547.E04.GZ43_505747 | M00084483A:E05 | chiron(cc187-NormBPHProstate) |
| 225 | 833174 | 3547.F02.GZ43_505716 | M00084480B:A05 | chiron(cc187-NormBPHProstate) |
| 226 | 500919 | 3547.F10.GZ43_505844 | M00084492B:F03 | chiron(cc187-NormBPHProstate) |
| 227 | 1226064 | 3547.F20.GZ43_506004 | M00084506A:E08 | chiron(cc187-NormBPHProstate) |
| 228 | 555509 | 3547.G02.GZ43_505717 | M00084479B:E04 | chiron(cc187-NormBPHProstate) |
| 229 | 653817 | 3547.G09.GZ43_505829 | M00084490A:C12 | chiron(cc187-NormBPHProstate) |
| 230 | 478212 | 3547.G22.GZ43_506037 | M00084509D:C02 | chiron(cc187-NormBPHProstate) |
| 231 | 1054074 | 3547.H12.GZ43_505878 | M00084495B:C11 | chiron(cc187-NormBPHProstate) |
| 232 | 1060021 | 3547.H14.GZ43_505910 | M00084497D:D03 | chiron(cc187-NormBPHProstate) |
| 233 | 1227352 | 3547.I07.GZ43_505799 | M00084487C:H06 | chiron(cc187-NormBPHProstate) |
| 234 | 8293 | 3547.I16.GZ43_505943 | M00084499C:C11 | chiron(cc187-NormBPHProstate) |
| 235 | 477110 | 3547.I17.GZ43_505959 | M00084501A:D06 | chiron(cc187-NormBPHProstate) |
| 236 | 1224039 | 3547.I20.GZ43_506007 | M00084505C:H08 | chiron(cc187-NormBPHProstate) |
| 237 | 542301 | 3547.J05.GZ43_505768 | M00084485C:B04 | chiron(cc187-NormBPHProstate) |
| 238 | 455211 | 3547.J10.GZ43_505848 | M00084492C:B05 | chiron(cc187-NormBPHProstate) |
| 239 | 1056369 | 3547.J20.GZ43_506008 | M00084506C:A05 | chiron(cc187-NormBPHProstate) |
| 240 | 549814 | 3547.J22.GZ43_506040 | M00084510C:F02 | chiron(cc187-NormBPHProstate) |
| 241 | 509673 | 3547.K01.GZ43_505705 | M00084477C:C07 | chiron(cc187-NormBPHProstate) |
| 242 | 736256 | 3547.L09.GZ43_505834 | M00084491A:E08 | chiron(cc187-NormBPHProstate) |
| 243 | 1139849 | 3547.L11.GZ43_505866 | M00084494C:C01 | chiron(cc187-NormBPHProstate) |
| 244 | 1223938 | 3547.L16.GZ43_505946 | M00084500C:D01 | chiron(cc187-NormBPHProstate) |
| 245 | 1059445 | 3547.L22.GZ43_506042 | M00084510C:F05 | chiron(cc187-NormBPHProstate) |
| 246 | 478212 | 3547.M02.GZ43_505723 | M00084479D:E10 | chiron(cc187-NormBPHProstate) |
| 247 | 1140418 | 3547.M07.GZ43_505803 | M00084487D:F04 | chiron(cc187-NormBPHProstate) |
| 248 | 534943 | 3547.M08.GZ43_505819 | M00084489A:D12 | chiron(cc187-NormBPHProstate) |
| 249 | 708025 | 3547.M16.GZ43_505947 | M00084499D:A10 | chiron(cc187-NormBPHProstate) |
| 250 | 1138419 | 3547.N06.GZ43_505788 | M00084487B:A06 | chiron(cc187-NormBPHProstate) |
| 251 | 1226588 | 3547.O03.GZ43_505741 | M00084481D:C06 | chiron(cc187-NormBPHProstate) |
| 252 | 461669 | 3547.O07.GZ43_505805 | M00084487D:F07 | chiron(cc187-NormBPHProstate) |
| 253 | 1060021 | 3547.O14.GZ43_505917 | M00084497B:C12 | chiron(cc187-NormBPHProstate) |
| 254 | 307985 | 3547.P18.GZ43_505982 | M00084503D:G10 | chiron(cc187-NormBPHProstate) |
| 255 | 840852 | 3547.P21.GZ43_506030 | M00084509A:E10 | chiron(cc187-NormBPHProstate) |
| 256 | 402286 | 3547.P22.GZ43_506046 | M00084510C:H01 | chiron(cc187-NormBPHProstate) |
| 257 | 451994 | 3550.A12.GZ43_506255 | M00084513C:C10 | chiron(cc187-NormBPHProstate) |
| 258 | 451679 | 3550.A16.GZ43_506319 | M00084514A:A03 | chiron(cc187-NormBPHProstate) |
| 259 | 450607 | 3550.B06.GZ43_506160 | M00084515D:G03 | chiron(cc187-NormBPHProstate) |
| 260 | 887560 | 3550.C01.GZ43_506081 | M00084517C:D06 | chiron(cc187-NormBPHProstate) |
| 261 | 727396 | 3550.C22.GZ43_506417 | M00084519B:D01 | chiron(cc187-NormBPHProstate) |
| 262 | 1224379 | 3550.D16.GZ43_506322 | M00084520B:A12 | chiron(cc187-NormBPHProstate) |
| 263 | 1137096 | 3550.D23.GZ43_506434 | M00084521A:E11 | chiron(cc187-NormBPHProstate) |
| 264 | 1052466 | 3550.E02.GZ43_506099 | M00084521B:E11 | chiron(cc187-NormBPHProstate) |
| 265 | 1064975 | 3550.E06.GZ43_506163 | M00084521C:H11 | chiron(cc187-NormBPHProstate) |
| 266 | 180092 | 3550.F06.GZ43_506164 | M00084523C:A05 | chiron(cc187-NormBPHProstate) |
| 267 | 1224269 | 3550.F08.GZ43_506196 | M00084523C:C10 | chiron(cc187-NormBPHProstate) |
| 268 | 1053564 | 3550.F20.GZ43_506388 | M00084524D:D02 | chiron(cc187-NormBPHProstate) |
| 269 | 677858 | 3550.F22.GZ43_506420 | M00084525A:E08 | chiron(cc187-NormBPHProstate) |
| 270 | 1225500 | 3550.G02.GZ43_506101 | M00084525D:H01 | chiron(cc187-NormBPHProstate) |
| 271 | 1054038 | 3550.G08.GZ43_506197 | M00084526C:G09 | chiron(cc187-NormBPHProstate) |
| 272 | 1037887 | 3550.G10.GZ43_506229 | M00084526D:E09 | chiron(cc187-NormBPHProstate) |
| 273 | 964080 | 3550.G15.GZ43_506309 | M00084527C:H07 | chiron(cc187-NormBPHProstate) |
| 274 | 553897 | 3550.G23.GZ43_506437 | M00084528C:F06 | chiron(cc187-NormBPHProstate) |
| 275 | 755391 | 3550.H10.GZ43_506230 | M00084530D:G07 | chiron(cc187-NormBPHProstate) |
| 276 | 644174 | 3550.H21.GZ43_506406 | M00084533A:C04 | chiron(cc187-NormBPHProstate) |
| 277 | 893981 | 3550.H23.GZ43_506438 | M00084533B:B10 | chiron(cc187-NormBPHProstate) |
| 278 | 821536 | 3550.I03.GZ43_506119 | M00084534B:E12 | chiron(cc187-NormBPHProstate) |
| 279 | 1227336 | 3550.I19.GZ43_506375 | M00084535D:C12 | chiron(cc187-NormBPHProstate) |
| 280 | 991366 | 3550.I21.GZ43_506407 | M00084536B:A03 | chiron(cc187-NormBPHProstate) |
| 281 | 549814 | 3550.J05.GZ43_506152 | M00084536D:F07 | chiron(cc187-NormBPHProstate) |
| 282 | 402588 | 3550.J11.GZ43_506248 | M00084537B:C05 | chiron(cc187-NormBPHProstate) |
| 283 | 710194 | 3550.K05.GZ43_506153 | M00084539D:D11 | chiron(cc187-NormBPHProstate) |
| 284 | 1222709 | 3550.K09.GZ43_506217 | M00084540B:B08 | chiron(cc187-NormBPHProstate) |
| 285 | 1053764 | 3550.K14.GZ43_506297 | M00084540D:B12 | chiron(cc187-NormBPHProstate) |
| 286 | 1062537 | 3550.L16.GZ43_506330 | M00084545C:C05 | chiron(cc187-NormBPHProstate) |
| 287 | 964593 | 3550.L19.GZ43_506378 | M00084546C:C06 | chiron(cc187-NormBPHProstate) |
| 288 | 1054038 | 3550.L23.GZ43_506442 | M00084547B:B10 | chiron(cc187-NormBPHProstate) |
| 289 | 1223477 | 3550.M21.GZ43_506411 | M00084553B:F04 | chiron(cc187-NormBPHProstate) |
| 290 | 402516 | 3550.N01.GZ43_506092 | M00084553D:G05 | chiron(cc187-NormBPHProstate) |
| 291 | 517014 | 3550.N07.GZ43_506188 | M00084554C:D05 | chiron(cc187-NormBPHProstate) |
| 292 | 1223505 | 3550.O03.GZ43_506125 | M00084558D:A04 | chiron(cc187-NormBPHProstate) |
| 293 | 872787 | 3550.O04.GZ43_506141 | M00084558D:G08 | chiron(cc187-NormBPHProstate) |
| 294 | 405366 | 3550.O08.GZ43_506205 | M00084559B:F10 | chiron(cc187-NormBPHProstate) |
| 295 | 48343 | 3550.O15.GZ43_506317 | M00084560A:G08 | chiron(cc187-NormBPHProstate) |
| 296 | 1074160 | 3550.O17.GZ43_506349 | M00084560B:F12 | chiron(cc187-NormBPHProstate) |
| 297 | 1225719 | 3550.O18.GZ43_506365 | M00084560C:G05 | chiron(cc187-NormBPHProstate) |
| 298 | 856703 | 3550.O21.GZ43_506413 | M00084561C:D07 | chiron(cc187-NormBPHProstate) |
| 299 | 970165 | 3550.P18.GZ43_506366 | M00084565A:D10 | chiron(cc187-NormBPHProstate) |
| 300 | 494890 | 3550.P23.GZ43_506446 | M00084565D:F08 | chiron(cc187-NormBPHProstate) |
| 301 | 1285039 | 3553.A09.GZ43_506591 | M00084587C:A07 | chiron(cc187-NormBPHProstate) |
| 302 | 1200453 | 3553.B07.GZ43_506560 | M00084584B:G07 | chiron(cc187-NormBPHProstate) |
| 303 | 1219617 | 3553.B16.GZ43_506704 | M00084602D:B09 | chiron(cc187-NormBPHProstate) |
| 304 | 1042918 | 3553.B22.GZ43_506800 | M00084612C:B01 | chiron(cc187-NormBPHProstate) |
| 305 | 1226086 | 3553.D04.GZ43_506514 | M00084576A:E12 | chiron(cc187-NormBPHProstate) |
| 306 | 861025 | 3553.D07.GZ43_506562 | M00084584B:H12 | chiron(cc187-NormBPHProstate) |
| 307 | 1224505 | 3553.D14.GZ43_506674 | M00084598D:H05 | chiron(cc187-NormBPHProstate) |
| 308 | 679724 | 3553.D19.GZ43_506754 | M00084605D:G09 | chiron(cc187-NormBPHProstate) |
| 309 | 234667 | 3553.E08.GZ43_506579 | M00084585D:H12 | chiron(cc187-NormBPHProstate) |
| 310 | 448576 | 3553.E09.GZ43_506595 | M00084587C:G07 | chiron(cc187-NormBPHProstate) |
| 311 | 450607 | 3553.F12.GZ43_506644 | M00084595C:C07 | chiron(cc187-NormBPHProstate) |
| 312 | 452322 | 3553.F13.GZ43_506660 | M00084597A:F06 | chiron(cc187-NormBPHProstate) |
| 313 | 1225384 | 3553.F19.GZ43_506756 | M00084607A:B03 | chiron(cc187-NormBPHProstate) |
| 314 | 974223 | 3553.G05.GZ43_506533 | M00084578B:E12 | chiron(cc187-NormBPHProstate) |
| 315 | 845715 | 3553.G06.GZ43_506549 | M00084581B:E06 | chiron(cc187-NormBPHProstate) |
| 316 | 1138997 | 3553.G07.GZ43_506565 | M00084583D:H12 | chiron(cc187-NormBPHProstate) |
| 317 | 478212 | 3553.G21.GZ43_506789 | M00084609C:F10 | chiron(cc187-NormBPHProstate) |
| 318 | 867148 | 3553.H06.GZ43_506550 | M00084582C:H03 | chiron(cc187-NormBPHProstate) |
| 319 | 1214202 | 3553.H09.GZ43_506598 | M00084588B:D02 | chiron(cc187-NormBPHProstate) |
| 320 | 585899 | 3553.H21.GZ43_506790 | M00084610D:H04 | chiron(cc187-NormBPHProstate) |
| 321 | 863475 | 3553.I13.GZ43_506663 | M00084596D:E10 | chiron(cc187-NormBPHProstate) |
| 322 | 725982 | 3553.I16.GZ43_506711 | M00084602C:E04 | chiron(cc187-NormBPHProstate) |
| 323 | 17075 | 3553.J12.GZ43_506648 | M00084595D:D08 | chiron(cc187-NormBPHProstate) |
| 324 | 1054813 | 3553.J14.GZ43_506680 | M00084599D:C02 | chiron(cc187-NormBPHProstate) |
| 325 | 1064975 | 3553.J16.GZ43_506712 | M00084603A:B07 | chiron(cc187-NormBPHProstate) |
| 326 | 1055089 | 3553.J17.GZ43_506728 | M00084604A:D02 | chiron(cc187-NormBPHProstate) |
| 327 | 551848 | 3553.J22.GZ43_506808 | M00084613A:A01 | chiron(cc187-NormBPHProstate) |
| 328 | 585899 | 3553.J24.GZ43_506840 | M00084568D:A02 | chiron(cc187-NormBPHProstate) |
| 329 | 1211899 | 3553.K01.GZ43_506473 | M00084569D:B04 | chiron(cc187-NormBPHProstate) |
| 330 | 460499 | 3553.K02.GZ43_506489 | M00084571C:D05 | chiron(cc187-NormBPHProstate) |
| 331 | 39115 | 3553.K03.GZ43_506505 | M00084573D:G11 | chiron(cc187-NormBPHProstate) |
| 332 | 242901 | 3553.K05.GZ43_506537 | M00084578C:G09 | chiron(cc187-NormBPHProstate) |
| 333 | 719892 | 3553.K07.GZ43_506569 | M00084584B:A02 | chiron(cc187-NormBPHProstate) |
| 334 | 1085638 | 3553.K15.GZ43_506697 | M00084600D:B10 | chiron(cc187-NormBPHProstate) |
| 335 | 449465 | 3538.A11.GZ43_504703 | M00084363A:C02 | chiron(cc187-NormBPHProstate) |
| 336 | 542825 | 3538.A24.GZ43_504911 | M00084364C:B06 | chiron(cc187-NormBPHProstate) |
| 337 | 1065531 | 3538.B01.GZ43_504544 | M00084364D:F08 | chiron(cc187-NormBPHProstate) |
| 338 | 985859 | 3538.B20.GZ43_504848 | M00084367D:E06 | chiron(cc187-NormBPHProstate) |
| 339 | 409182 | 3538.C01.GZ43_504545 | M00084368D:C02 | chiron(cc187-NormBPHProstate) |
| 340 | 1223271 | 3538.C02.GZ43_504561 | M00084368D:D03 | chiron(cc187-NormBPHProstate) |
| 341 | 445742 | 3538.D06.GZ43_504626 | M00084372D:H11 | chiron(cc187-NormBPHProstate) |
| 342 | 451679 | 3538.D09.GZ43_504674 | M00084373A:F08 | chiron(cc187-NormBPHProstate) |
| 343 | 1141371 | 3538.D21.GZ43_504866 | M00084374A:A10 | chiron(cc187-NormBPHProstate) |
| 344 | 1014734 | 3538.E15.GZ43_504771 | M00084376A:E06 | chiron(cc187-NormBPHProstate) |
| 345 | 1226932 | 3538.F02.GZ43_504564 | M00084377B:E11 | chiron(cc187-NormBPHProstate) |
| 346 | 1227303 | 3538.F08.GZ43_504660 | M00084377D:E08 | chiron(cc187-NormBPHProstate) |
| 347 | 561390 | 3553.K23.GZ43_506825 | M00084614C:G05 | chiron(cc187-NormBPHProstate) |
| 348 | 529709 | 3553.K24.GZ43_506841 | M00084567B:F03 | chiron(cc187-NormBPHProstate) |
| 349 | 1227781 | 3553.L02.GZ43_506490 | M00084572D:F07 | chiron(cc187-NormBPHProstate) |
| 350 | 1138572 | 3553.L04.GZ43_506522 | M00084577B:C08 | chiron(cc187-NormBPHProstate) |
| 351 | 1117003 | 3553.L21.GZ43_506794 | M00084611A:A06 | chiron(cc187-NormBPHProstate) |
| 352 | 1228033 | 3553.M12.GZ43_506651 | M00084595B:C08 | chiron(cc187-NormBPHProstate) |
| 353 | 961119 | 3553.M23.GZ43_506827 | M00084614D:A08 | chiron(cc187-NormBPHProstate) |
| 354 | 611592 | 3553.N01.GZ43_506476 | M00084571A:C02 | chiron(cc187-NormBPHProstate) |
| 355 | 555115 | 3553.N02.GZ43_506492 | M00084573A:A10 | chiron(cc187-NormBPHProstate) |
| 356 | 856703 | 3553.N04.GZ43_506524 | M00084577B:D04 | chiron(cc187-NormBPHProstate) |
| 357 | 846056 | 3553.N07.GZ43_506572 | M00084585B:D06 | chiron(cc187-NormBPHProstate) |
| 358 | 640277 | 3553.N08.GZ43_506588 | M00084587B:H07 | chiron(cc187-NormBPHProstate) |
| 359 | 214192 | 3553.O07.GZ43_506573 | M00084584B:F09 | chiron(cc187-NormBPHProstate) |
| 360 | 1226160 | 3553.O18.GZ43_506749 | M00084604D:D08 | chiron(cc187-NormBPHProstate) |
| 361 | 1227968 | 3553.O23.GZ43_506829 | M00084614D:B07 | chiron(cc187-NormBPHProstate) |
| 362 | 1224269 | 3553.P03.GZ43_506510 | M00084575A:A11 | chiron(cc187-NormBPHProstate) |
| 363 | 774520 | 3553.P05.GZ43_506542 | M00084580B:B05 | chiron(cc187-NormBPHProstate) |
| 364 | 1227457 | 3553.P12.GZ43_506654 | M00084596A:G03 | chiron(cc187-NormBPHProstate) |
| 365 | 1110143 | 3553.P18.GZ43_506750 | M00084605B:H04 | chiron(cc187-NormBPHProstate) |
| 366 | 554189 | 3553.P21.GZ43_506798 | M00084611B:A11 | chiron(cc187-NormBPHProstate) |
| 367 | 4745 | 3556.A03.GZ43_506879 | M00084620D:E05 | chiron(cc187-NormBPHProstate) |
| 368 | 1194731 | 3556.A06.GZ43_506927 | M00084633B:A06 | chiron(cc187-NormBPHProstate) |
| 369 | 970165 | 3556.B06.GZ43_506928 | M00084634A:D01 | chiron(cc187-NormBPHProstate) |
| 370 | 1224422 | 3556.B09.GZ43_506976 | M00084640D:A08 | chiron(cc187-NormBPHProstate) |
| 371 | 613411 | 3556.B10.GZ43_506992 | M00084642C:F10 | chiron(cc187-NormBPHProstate) |
| 372 | 1056369 | 3556.B14.GZ43_507056 | M00084647C:E12 | chiron(cc187-NormBPHProstate) |
| 373 | 84347 | 3556.C13.GZ43_507041 | M00084645D:G02 | chiron(cc187-NormBPHProstate) |
| 374 | 1138593 | 3556.C15.GZ43_507073 | M00084648A:F08 | chiron(cc187-NormBPHProstate) |
| 375 | 845715 | 3556.C18.GZ43_507121 | M00084654A:E04 | chiron(cc187-NormBPHProstate) |
| 376 | 971226 | 3556.C24.GZ43_507217 | M00084615D:H12 | chiron(cc187-NormBPHProstate) |
| 377 | 1138593 | 3556.D15.GZ43_507074 | M00084648D:F05 | chiron(cc187-NormBPHProstate) |
| 378 | 413505 | 3556.D20.GZ43_507154 | M00084657C:E01 | chiron(cc187-NormBPHProstate) |
| 379 | 1224107 | 3556.D23.GZ43_507202 | M00084666A:C04 | chiron(cc187-NormBPHProstate) |
| 380 | 774520 | 3556.E13.GZ43_507043 | M00084646A:D02 | chiron(cc187-NormBPHProstate) |
| 381 | 573169 | 3556.E24.GZ43_507219 | M00084616A:G03 | chiron(cc187-NormBPHProstate) |
| 382 | 1053417 | 3556.F10.GZ43_506996 | M00084642D:E08 | chiron(cc187-NormBPHProstate) |
| 383 | 710194 | 3556.G15.GZ43_507077 | M00084648B:F06 | chiron(cc187-NormBPHProstate) |
| 384 | 558484 | 3556.H01.GZ43_506854 | M00084618C:A03 | chiron(cc187-NormBPHProstate) |
| 385 | 1211899 | 3556.H02.GZ43_506870 | M00084620A:E08 | chiron(cc187-NormBPHProstate) |
| 386 | 823271 | 3556.H12.GZ43_507030 | M00084645C:F07 | chiron(cc187-NormBPHProstate) |
| 387 | 376900 | 3556.H20.GZ43_507158 | M00084657D:B10 | chiron(cc187-NormBPHProstate) |
| 388 | 726584 | 3556.I02.GZ43_506871 | M00084619A:E04 | chiron(cc187-NormBPHProstate) |
| 389 | 725982 | 3556.I14.GZ43_507063 | M00084647C:A05 | chiron(cc187-NormBPHProstate) |
| 390 | 1211899 | 3556.J05.GZ43_506920 | M00084633A:B12 | chiron(cc187-NormBPHProstate) |
| 391 | 857031 | 3556.J07.GZ43_506952 | M00084636C:A06 | chiron(cc187-NormBPHProstate) |
| 392 | 1054813 | 3556.J14.GZ43_507064 | M00084647D:C05 | chiron(cc187-NormBPHProstate) |
| 393 | 1226862 | 3556.J16.GZ43_507096 | M00084651B:G10 | chiron(cc187-NormBPHProstate) |
| 394 | 1224422 | 3556.K04.GZ43_506905 | M00084630D:F09 | chiron(cc187-NormBPHProstate) |
| 395 | 529709 | 3556.K12.GZ43_507033 | M00084645B:A06 | chiron(cc187-NormBPHProstate) |
| 396 | 450882 | 3556.K13.GZ43_507049 | M00084646B:B03 | chiron(cc187-NormBPHProstate) |
| 397 | 1224039 | 3556.K17.GZ43_507113 | M00084652D:G11 | chiron(cc187-NormBPHProstate) |
| 398 | 1224598 | 3556.L08.GZ43_506970 | M00084638D:A05 | chiron(cc187-NormBPHProstate) |
| 399 | 398211 | 3556.L09.GZ43_506986 | M00084641B:F08 | chiron(cc187-NormBPHProstate) |
| 400 | 1245188 | 3556.L16.GZ43_507098 | M00084651C:H01 | chiron(cc187-NormBPHProstate) |
| 401 | 558081 | 3556.L23.GZ43_507210 | M00084666C:A06 | chiron(cc187-NormBPHProstate) |
| 402 | 1224379 | 3556.M02.GZ43_506875 | M00084619A:G10 | chiron(cc187-NormBPHProstate) |
| 403 | 733538 | 3556.M11.GZ43_507019 | M00084644A:H05 | chiron(cc187-NormBPHProstate) |
| 404 | 727396 | 3556.M23.GZ43_507211 | M00084664D:E05 | chiron(cc187-NormBPHProstate) |
| 405 | 16872 | 3556.N02.GZ43_506876 | M00084620B:F05 | chiron(cc187-NormBPHProstate) |
| 406 | 1139849 | 3556.N04.GZ43_506908 | M00084631D:G01 | chiron(cc187-NormBPHProstate) |
| 407 | 1122528 | 3556.N05.GZ43_506924 | M00084633A:H05 | chiron(cc187-NormBPHProstate) |
| 408 | 1077319 | 3556.N06.GZ43_506940 | M00084634C:H02 | chiron(cc187-NormBPHProstate) |
| 409 | 1116087 | 3556.N21.GZ43_507180 | M00084659C:G05 | chiron(cc187-NormBPHProstate) |
| 410 | 1198563 | 3556.O08.GZ43_506973 | M00084638A:E10 | chiron(cc187-NormBPHProstate) |
| 411 | 585099 | 3556.O13.GZ43_507053 | M00084646B:D07 | chiron(cc187-NormBPHProstate) |
| 412 | 650520 | 3556.P07.GZ43_506958 | M00084637B:E01 | chiron(cc187-NormBPHProstate) |
| 413 | 844957 | 3559.A04.GZ43_507279 | M00084673B:H11 | chiron(cc187-NormBPHProstate) |
| 414 | 1077033 | 3559.A20.GZ43_507535 | M00084702A:B08 | chiron(cc187-NormBPHProstate) |
| 415 | 1187174 | 3559.A24.GZ43_507599 | M00084667C:A03 | chiron(cc187-NormBPHProstate) |
| 416 | 402789 | 3559.B04.GZ43_507280 | M00084675A:E02 | chiron(cc187-NormBPHProstate) |
| 417 | 863768 | 3559.B06.GZ43_507312 | M00084681B:G11 | chiron(cc187-NormBPHProstate) |
| 418 | 650263 | 3559.B08.GZ43_507344 | M00084684C:D02 | chiron(cc187-NormBPHProstate) |
| 419 | 1054038 | 3559.B10.GZ43_507376 | M00084687A:A03 | chiron(cc187-NormBPHProstate) |
| 420 | 38 | 3559.B18.GZ43_507504 | M00084700A:C10 | chiron(cc187-NormBPHProstate) |
| 421 | 1227324 | 3559.C06.GZ43_507313 | M00084679D:G12 | chiron(cc187-NormBPHProstate) |
| 422 | 1250373 | 3559.D21.GZ43_507554 | M00084704A:C12 | chiron(cc187-NormBPHProstate) |
| 423 | 1227912 | 3559.E06.GZ43_507315 | M00084680A:F08 | chiron(cc187-NormBPHProstate) |
| 424 | 1066654 | 3559.E09.GZ43_507363 | M00084685C:B12 | chiron(cc187-NormBPHProstate) |
| 425 | 703204 | 3559.E20.GZ43_507539 | M00084702B:C12 | chiron(cc187-NormBPHProstate) |
| 426 | 1227912 | 3559.F07.GZ43_507332 | M00084683B:A01 | chiron(cc187-NormBPHProstate) |
| 427 | 141870 | 3559.F17.GZ43_507492 | M00084699A:G05 | chiron(cc187-NormBPHProstate) |
| 428 | 15577 | 3559.H09.GZ43_507366 | M00084686B:B04 | chiron(cc187-NormBPHProstate) |
| 429 | 129786 | 3559.H22.GZ43_507574 | M00084705C:D01 | chiron(cc187-NormBPHProstate) |
| 430 | 454826 | 3559.H24.GZ43_507606 | M00084668D:D08 | chiron(cc187-NormBPHProstate) |
| 431 | 647587 | 3559.I05.GZ43_507303 | M00084676B:E02 | chiron(cc187-NormBPHProstate) |
| 432 | 915012 | 3559.J04.GZ43_507288 | M00084675B:A04 | chiron(cc187-NormBPHProstate) |
| 433 | 3155 | 3559.J20.GZ43_507544 | M00084703B:D09 | chiron(cc187-NormBPHProstate) |
| 434 | 1210953 | 3559.K16.GZ43_507481 | M00084696D:H04 | chiron(cc187-NormBPHProstate) |
| 435 | 576040 | 3559.K17.GZ43_507497 | M00084698B:D02 | chiron(cc187-NormBPHProstate) |
| 436 | 945247 | 3559.L01.GZ43_507242 | M00084670B:A09 | chiron(cc187-NormBPHProstate) |
| 437 | 1197444 | 3559.L14.GZ43_507450 | M00084694D:F04 | chiron(cc187-NormBPHProstate) |
| 438 | 573169 | 3559.L19.GZ43_507530 | M00084701C:E08 | chiron(cc187-NormBPHProstate) |
| 439 | 387256 | 3559.M02.GZ43_507259 | M00084671A:C12 | chiron(cc187-NormBPHProstate) |
| 440 | 1227993 | 3559.M09.GZ43_507371 | M00084685D:B11 | chiron(cc187-NormBPHProstate) |
| 441 | 1117392 | 3559.N05.GZ43_507308 | M00084678C:C11 | chiron(cc187-NormBPHProstate) |
| 442 | 726584 | 3559.N18.GZ43_507516 | M00084700D:E09 | chiron(cc187-NormBPHProstate) |
| 443 | 496962 | 3559.N21.GZ43_507564 | M00084704C:B09 | chiron(cc187-NormBPHProstate) |
| 444 | 402378 | 3559.O01.GZ43_507245 | M00084669C:A10 | chiron(cc187-NormBPHProstate) |
| 445 | 991366 | 3559.O05.GZ43_507309 | M00084677C:F03 | chiron(cc187-NormBPHProstate) |
| 446 | 860553 | 3559.O07.GZ43_507341 | M00084683A:B12 | chiron(cc187-NormBPHProstate) |
| 447 | 644687 | 3559.O20.GZ43_507549 | M00084703A:E04 | chiron(cc187-NormBPHProstate) |
| 448 | 129786 | 3559.P10.GZ43_507390 | M00084687C:F12 | chiron(cc187-NormBPHProstate) |
| 449 | 1062537 | 3559.P15.GZ43_507470 | M00084696C:A07 | chiron(cc187-NormBPHProstate) |
| 450 | 1197259 | 3559.P18.GZ43_507518 | M00084700D:H04 | chiron(cc187-NormBPHProstate) |
| 451 | 164618 | 3559.P24.GZ43_507614 | M00084669A:A05 | chiron(cc187-NormBPHProstate) |
| 452 | 1225264 | 3562.A01.GZ43_507615 | M00084707D:H03 | chiron(cc187-NormBPHProstate) |
| 453 | 1220708 | 3562.A15.GZ43_507839 | M00084727A:A02 | chiron(cc187-NormBPHProstate) |
| 454 | 727136 | 3562.B22.GZ43_507952 | M00084737A:C09 | chiron(cc187-NormBPHProstate) |
| 455 | 1225595 | 3562.C23.GZ43_507969 | M00084738B:A09 | chiron(cc187-NormBPHProstate) |
| 456 | 726522 | 3562.D10.GZ43_507762 | M00084720A:A01 | chiron(cc187-NormBPHProstate) |
| 457 | 846920 | 3562.E01.GZ43_507619 | M00084708A:A11 | chiron(cc187-NormBPHProstate) |
| 458 | 448356 | 3562.E03.GZ43_507651 | M00084710B:G07 | chiron(cc187-NormBPHProstate) |
| 459 | 1254733 | 3562.E12.GZ43_507795 | M00084722A:H12 | chiron(cc187-NormBPHProstate) |
| 460 | 453901 | 3562.F19.GZ43_507908 | M00084732B:A04 | chiron(cc187-NormBPHProstate) |
| 461 | 530453 | 3562.F20.GZ43_507924 | M00084734A:H01 | chiron(cc187-NormBPHProstate) |
| 462 | 1253670 | 3562.G13.GZ43_507813 | M00084723D:G09 | chiron(cc187-NormBPHProstate) |
| 463 | 971465 | 3562.G19.GZ43_507909 | M00084731C:G07 | chiron(cc187-NormBPHProstate) |
| 464 | 270 | 3562.H11.GZ43_507782 | M00084721C:F09 | chiron(cc187-NormBPHProstate) |
| 465 | 970165 | 3562.H12.GZ43_507798 | M00084722D:A03 | chiron(cc187-NormBPHProstate) |
| 466 | 726522 | 3562.I01.GZ43_507623 | M00084708B:A06 | chiron(cc187-NormBPHProstate) |
| 467 | 1053799 | 3562.I02.GZ43_507639 | M00084709C:B02 | chiron(cc187-NormBPHProstate) |
| 468 | 848701 | 3562.I13.GZ43_507815 | M00084724A:C02 | chiron(cc187-NormBPHProstate) |
| 469 | 1260846 | 3562.I15.GZ43_507847 | M00084727A:G09 | chiron(cc187-NormBPHProstate) |
| 470 | 1257096 | 3562.J09.GZ43_507752 | M00084718D:C04 | chiron(cc187-NormBPHProstate) |
| 471 | 1253087 | 3562.J13.GZ43_507816 | M00084724D:F04 | chiron(cc187-NormBPHProstate) |
| 472 | 447950 | 3562.K04.GZ43_507673 | M00084711B:A05 | chiron(cc187-NormBPHProstate) |
| 473 | 393948 | 3562.K08.GZ43_507737 | M00084716D:H03 | chiron(cc187-NormBPHProstate) |
| 474 | 893981 | 3562.L12.GZ43_507802 | M00084722D:G04 | chiron(cc187-NormBPHProstate) |
| 475 | 1224881 | 3562.N24.GZ43_507996 | M00084707D:B08 | chiron(cc187-NormBPHProstate) |
| 476 | 1141283 | 3562.O11.GZ43_507789 | M00084721B:C11 | chiron(cc187-NormBPHProstate) |
| 477 | 742101 | 3562.O18.GZ43_507901 | M00084730B:A09 | chiron(cc187-NormBPHProstate) |
| 478 | 34028 | 3562.O20.GZ43_507933 | M00084734A:E04 | chiron(cc187-NormBPHProstate) |
| 479 | 1254674 | 3562.P21.GZ43_507950 | M00084736B:H03 | chiron(cc187-NormBPHProstate) |
| 480 | 1226413 | 3562.P23.GZ43_507982 | M00084740C:B08 | chiron(cc187-NormBPHProstate) |
| 481 | 5375 | 3565.A23.GZ43_508351 | M00084742A:F07 | chiron(cc187-NormBPHProstate) |
| 482 | 628570 | 3565.B05.GZ43_508064 | M00084743A:E03 | chiron(cc187-NormBPHProstate) |
| 483 | 1055018 | 3565.B13.GZ43_508192 | M00084743D:G01 | chiron(cc187-NormBPHProstate) |
| 484 | 1139088 | 3565.B14.GZ43_508208 | M00084743D:H04 | chiron(cc187-NormBPHProstate) |
| 485 | 453522 | 3565.C04.GZ43_508049 | M00084745A:A08 | chiron(cc187-NormBPHProstate) |
| 486 | 551891 | 3565.C06.GZ43_508081 | M00084745A:H04 | chiron(cc187-NormBPHProstate) |
| 487 | 700354 | 3565.C17.GZ43_508257 | M00084746B:B04 | chiron(cc187-NormBPHProstate) |
| 488 | 1116087 | 3565.D14.GZ43_508210 | M00084747D:G02 | chiron(cc187-NormBPHProstate) |
| 489 | 640462 | 3565.D17.GZ43_508258 | M00084748A:D09 | chiron(cc187-NormBPHProstate) |
| 490 | 477110 | 3565.D19.GZ43_508290 | M00084748A:H02 | chiron(cc187-NormBPHProstate) |
| 491 | 34201 | 3565.E16.GZ43_508243 | M00084750C:B08 | chiron(cc187-NormBPHProstate) |
| 492 | 1225264 | 3565.G07.GZ43_508101 | M00084755A:D02 | chiron(cc187-NormBPHProstate) |
| 493 | 16872 | 3565.G09.GZ43_508133 | M00084755B:A04 | chiron(cc187-NormBPHProstate) |
| 494 | 1171518 | 3565.G22.GZ43_508341 | M00084755D:E06 | chiron(cc187-NormBPHProstate) |
| 495 | 1261580 | 3565.H06.GZ43_508086 | M00084756B:H01 | chiron(cc187-NormBPHProstate) |
| 496 | 1261892 | 3565.H10.GZ43_508150 | M00084756C:H01 | chiron(cc187-NormBPHProstate) |
| 497 | 454612 | 3565.H11.GZ43_508166 | M00084756D:C04 | chiron(cc187-NormBPHProstate) |
| 498 | 1258398 | 3565.H15.GZ43_508230 | M00084757A:D01 | chiron(cc187-NormBPHProstate) |
| 499 | 1259394 | 3565.H23.GZ43_508358 | M00084757B:F11 | chiron(cc187-NormBPHProstate) |
| 500 | 1225106 | 3565.H24.GZ43_508374 | M00084757B:F05 | chiron(cc187-NormBPHProstate) |
| 501 | 936795 | 3565.K15.GZ43_508233 | M00084760D:D09 | chiron(cc187-NormBPHProstate) |
| 502 | 552432 | 3565.L22.GZ43_508346 | M00084763D:A04 | chiron(cc187-NormBPHProstate) |
| 503 | 477692 | 3565.M15.GZ43_508235 | M00084764D:G08 | chiron(cc187-NormBPHProstate) |
| 504 | 1055063 | 3565.M20.GZ43_508315 | M00084765B:A10 | chiron(cc187-NormBPHProstate) |
| 505 | 1258456 | 3565.N12.GZ43_508188 | M00084766B:E03 | chiron(cc187-NormBPHProstate) |
| 506 | 1259319 | 3565.N13.GZ43_508204 | M00084766B:F02 | chiron(cc187-NormBPHProstate) |
| 507 | 1052399 | 3565.N19.GZ43_508300 | M00084766D:F12 | chiron(cc187-NormBPHProstate) |
| 508 | 1066041 | 3565.O02.GZ43_508029 | M00084767B:D10 | chiron(cc187-NormBPHProstate) |
| 509 | 1259872 | 3565.O03.GZ43_508045 | M00084767B:F06 | chiron(cc187-NormBPHProstate) |
| 510 | 1055029 | 3565.O07.GZ43_508109 | M00084767D:B04 | chiron(cc187-NormBPHProstate) |
| 511 | 1218793 | 3565.O15.GZ43_508237 | M00084768B:E09 | chiron(cc187-NormBPHProstate) |
| 512 | 141870 | 3565.P03.GZ43_508046 | M00084769C:H03 | chiron(cc187-NormBPHProstate) |
| 513 | 2424 | 3565.P09.GZ43_508142 | M00084770B:G12 | chiron(cc187-NormBPHProstate) |
| 514 | 477708 | 3565.P22.GZ43_508350 | M00084771D:A01 | chiron(cc187-NormBPHProstate) |
| 515 | 1226643 | 3565.P24.GZ43_508382 | M00084771D:G03 | chiron(cc187-NormBPHProstate) |
| 516 | 1224226 | 3568.A10.GZ43_508545 | M00084810D:B10 | chiron(cc187-NormBPHProstate) |
| 517 | 1171985 | 3568.B02.GZ43_508418 | M00084812A:C02 | chiron(cc187-NormBPHProstate) |
| 518 | 1193205 | 3568.B05.GZ43_508466 | M00084812A:E05 | chiron(cc187-NormBPHProstate) |
| 519 | 710194 | 3568.C22.GZ43_508739 | M00084817A:H11 | chiron(cc187-NormBPHProstate) |
| 520 | 1225335 | 3568.D23.GZ43_508756 | M00084820D:A03 | chiron(cc187-NormBPHProstate) |
| 521 | 402794 | 3568.E17.GZ43_508661 | M00084822B:G11 | chiron(cc187-NormBPHProstate) |
| 522 | 380634 | 3568.E20.GZ43_508709 | M00084822C:D06 | chiron(cc187-NormBPHProstate) |
| 523 | 389995 | 3568.F06.GZ43_508486 | M00084823A:H01 | chiron(cc187-NormBPHProstate) |
| 524 | 451390 | 3568.F07.GZ43_508502 | M00084823A:H06 | chiron(cc187-NormBPHProstate) |
| 525 | 1137259 | 3568.F11.GZ43_508566 | M00084823D:E05 | chiron(cc187-NormBPHProstate) |
| 526 | 1251950 | 3568.F12.GZ43_508582 | M00084823D:E06 | chiron(cc187-NormBPHProstate) |
| 527 | 1250995 | 3568.F22.GZ43_508742 | M00084824C:C10 | chiron(cc187-NormBPHProstate) |
| 528 | 1052466 | 3568.G10.GZ43_508551 | M00084826B:D12 | chiron(cc187-NormBPHProstate) |
| 529 | 621702 | 3568.G12.GZ43_508583 | M00084826B:E11 | chiron(cc187-NormBPHProstate) |
| 530 | 617292 | 3568.G24.GZ43_508775 | M00084827D:D04 | chiron(cc187-NormBPHProstate) |
| 531 | 8045 | 3568.H20.GZ43_508712 | M00084829B:F06 | chiron(cc187-NormBPHProstate) |
| 532 | 1224752 | 3568.J10.GZ43_508554 | M00084833A:G07 | chiron(cc187-NormBPHProstate) |
| 533 | 1210953 | 3568.J22.GZ43_508746 | M00084833D:B04 | chiron(cc187-NormBPHProstate) |
| 534 | 746389 | 3568.K01.GZ43_508411 | M00084834A:A03 | chiron(cc187-NormBPHProstate) |
| 535 | 845931 | 3568.K04.GZ43_508459 | M00084834B:G02 | chiron(cc187-NormBPHProstate) |
| 536 | 847516 | 3568.L04.GZ43_508460 | M00084835D:H03 | chiron(cc187-NormBPHProstate) |
| 537 | 1110143 | 3568.M03.GZ43_508445 | M00084837B:E06 | chiron(cc187-NormBPHProstate) |
| 538 | 1200453 | 3568.M13.GZ43_508605 | M00084838A:F12 | chiron(cc187-NormBPHProstate) |
| 539 | 1256602 | 3568.N11.GZ43_508574 | M00084839C:B09 | chiron(cc187-NormBPHProstate) |
| 540 | 1193970 | 3568.O17.GZ43_508671 | M00084841B:H09 | chiron(cc187-NormBPHProstate) |
| 541 | 1256564 | 3568.P04.GZ43_508464 | M00084842C:B07 | chiron(cc187-NormBPHProstate) |
| 542 | 1257732 | 3568.P18.GZ43_508688 | M00084843A:D06 | chiron(cc187-NormBPHProstate) |
| 543 | 7856 | 3568.P19.GZ43_508704 | M00084843A:G01 | chiron(cc187-NormBPHProstate) |
| 544 | 449697 | 3571.A04.GZ43_508833 | M00084843D:C06 | chiron(cc187-NormBPHProstate) |
| 545 | 1136972 | 3571.A07.GZ43_508881 | M00084843D:F05 | chiron(cc187-NormBPHProstate) |
| 546 | 1140865 | 3571.A08.GZ43_508897 | M00084844A:E10 | chiron(cc187-NormBPHProstate) |
| 547 | 1079863 | 3571.A11.GZ43_508945 | M00084844B:H08 | chiron(cc187-NormBPHProstate) |
| 548 | 1225500 | 3571.A14.GZ43_508993 | M00084844C:F04 | chiron(cc187-NormBPHProstate) |
| 549 | 1189027 | 3571.A22.GZ43_509121 | M00084845A:E02 | chiron(cc187-NormBPHProstate) |
| 550 | 1069632 | 3571.B13.GZ43_508978 | M00084845C:H05 | chiron(cc187-NormBPHProstate) |
| 551 | 1069632 | 3571.B22.GZ43_509122 | M00084846B:H07 | chiron(cc187-NormBPHProstate) |
| 552 | 387610 | 3571.C08.GZ43_508899 | M00084847B:G05 | chiron(cc187-NormBPHProstate) |
| 553 | 1261134 | 3571.D04.GZ43_508836 | M00084849A:H08 | chiron(cc187-NormBPHProstate) |
| 554 | 599820 | 3571.D07.GZ43_508884 | M00084849B:F11 | chiron(cc187-NormBPHProstate) |
| 555 | 418320 | 3571.E02.GZ43_508805 | M00084850C:A11 | chiron(cc187-NormBPHProstate) |
| 556 | 1224593 | 3571.E10.GZ43_508933 | M00084850D:H02 | chiron(cc187-NormBPHProstate) |
| 557 | 1116087 | 3571.E16.GZ43_509029 | M00084851C:F10 | chiron(cc187-NormBPHProstate) |
| 558 | 985859 | 3571.F06.GZ43_508870 | M00084853A:F08 | chiron(cc187-NormBPHProstate) |
| 559 | 1193236 | 3571.F16.GZ43_509030 | M00084853D:A12 | chiron(cc187-NormBPHProstate) |
| 560 | 504904 | 3571.F23.GZ43_509142 | M00084853D:G03 | chiron(cc187-NormBPHProstate) |
| 561 | 242901 | 3571.G22.GZ43_509127 | M00084855D:H05 | chiron(cc187-NormBPHProstate) |
| 562 | 1226845 | 3571.G24.GZ43_509159 | M00084856B:A12 | chiron(cc187-NormBPHProstate) |
| 563 | 140314 | 3571.H01.GZ43_508792 | M00084856B:D03 | chiron(cc187-NormBPHProstate) |
| 564 | 1260905 | 3571.H10.GZ43_508936 | M00084857A:G05 | chiron(cc187-NormBPHProstate) |
| 565 | 556772 | 3571.H12.GZ43_508968 | M00084857B:A09 | chiron(cc187-NormBPHProstate) |
| 566 | 1176182 | 3571.H16.GZ43_509032 | M00084857C:E11 | chiron(cc187-NormBPHProstate) |
| 567 | 1198072 | 3571.H18.GZ43_509064 | M00084857D:A11 | chiron(cc187-NormBPHProstate) |
| 568 | 677434 | 3571.I11.GZ43_508953 | M00084858C:B01 | chiron(cc187-NormBPHProstate) |
| 569 | 1193236 | 3571.J07.GZ43_508890 | M00084859C:D09 | chiron(cc187-NormBPHProstate) |
| 570 | 1055089 | 3571.J08.GZ43_508906 | M00084859C:H05 | chiron(cc187-NormBPHProstate) |
| 571 | 1054884 | 3571.J09.GZ43_508922 | M00084859D:B03 | chiron(cc187-NormBPHProstate) |
| 572 | 494499 | 3571.J14.GZ43_509002 | M00084860B:A01 | chiron(cc187-NormBPHProstate) |
| 573 | 686418 | 3571.L01.GZ43_508796 | M00084862B:B01 | chiron(cc187-NormBPHProstate) |
| 574 | 1140409 | 3571.M17.GZ43_509053 | M00084865D:B04 | chiron(cc187-NormBPHProstate) |
| 575 | 1260480 | 3571.M19.GZ43_509085 | M00084865D:G02 | chiron(cc187-NormBPHProstate) |
| 576 | 402516 | 3571.M24.GZ43_509165 | M00084866B:A03 | chiron(cc187-NormBPHProstate) |
| 577 | 1052374 | 3571.N09.GZ43_508926 | M00084866C:H04 | chiron(cc187-NormBPHProstate) |
| 578 | 1141620 | 3571.N14.GZ43_509006 | M00084867A:C11 | chiron(cc187-NormBPHProstate) |
| 579 | 1255330 | 3571.N17.GZ43_509054 | M00084867B:A03 | chiron(cc187-NormBPHProstate) |
| 580 | 1193699 | 3571.N22.GZ43_509134 | M00084867C:G02 | chiron(cc187-NormBPHProstate) |
| 581 | 1054884 | 3571.O08.GZ43_508911 | M00084868B:D01 | chiron(cc187-NormBPHProstate) |
| 582 | 866609 | 3574.A20.GZ43_509473 | M00084902B:A10 | chiron(cc187-NormBPHProstate) |
| 583 | 1059332 | 3574.B01.GZ43_509170 | M00084876D:A06 | chiron(cc187-NormBPHProstate) |
| 584 | 567700 | 3574.B04.GZ43_509218 | M00084880B:D03 | chiron(cc187-NormBPHProstate) |
| 585 | 1255268 | 3574.B10.GZ43_509314 | M00084888D:A11 | chiron(cc187-NormBPHProstate) |
| 586 | 401682 | 3574.B14.GZ43_509378 | M00084894A:G09 | chiron(cc187-NormBPHProstate) |
| 587 | 477110 | 3574.B24.GZ43_509538 | M00084874D:E03 | chiron(cc187-NormBPHProstate) |
| 588 | 554093 | 3574.C09.GZ43_509299 | M00084887C:C07 | chiron(cc187-NormBPHProstate) |
| 589 | 1225044 | 3574.C10.GZ43_509315 | M00084888C:D12 | chiron(cc187-NormBPHProstate) |
| 590 | 202671 | 3574.C12.GZ43_509347 | M00084890B:E02 | chiron(cc187-NormBPHProstate) |
| 591 | 89833 | 3574.C14.GZ43_509379 | M00084893C:A12 | chiron(cc187-NormBPHProstate) |
| 592 | 1225804 | 3574.C16.GZ43_509411 | M00084896B:G10 | chiron(cc187-NormBPHProstate) |
| 593 | 1225044 | 3574.C23.GZ43_509523 | M00084907C:C01 | chiron(cc187-NormBPHProstate) |
| 594 | 556772 | 3574.D02.GZ43_509188 | M00084878B:B12 | chiron(cc187-NormBPHProstate) |
| 595 | 1193236 | 3574.D12.GZ43_509348 | M00084890D:F09 | chiron(cc187-NormBPHProstate) |
| 596 | 676665 | 3574.E02.GZ43_509189 | M00084877D:G07 | chiron(cc187-NormBPHProstate) |
| 597 | 555059 | 3574.E03.GZ43_509205 | M00084879A:A04 | chiron(cc187-NormBPHProstate) |
| 598 | 450882 | 3574.E14.GZ43_509381 | M00084893C:B01 | chiron(cc187-NormBPHProstate) |
| 599 | 1053799 | 3574.F10.GZ43_509318 | M00084889A:B07 | chiron(cc187-NormBPHProstate) |
| 600 | 402286 | 3574.F18.GZ43_509446 | M00084900C:A04 | chiron(cc187-NormBPHProstate) |
| 601 | 1052364 | 3574.F23.GZ43_509526 | M00084908C:F07 | chiron(cc187-NormBPHProstate) |
| 602 | 496233 | 3574.G07.GZ43_509271 | M00084884D:D03 | chiron(cc187-NormBPHProstate) |
| 603 | 1193473 | 3574.G11.GZ43_509335 | M00084889C:A04 | chiron(cc187-NormBPHProstate) |
| 604 | 1223271 | 3574.H07.GZ43_509272 | M00084885D:A12 | chiron(cc187-NormBPHProstate) |
| 605 | 494890 | 3574.I02.GZ43_509193 | M00084877D:H09 | chiron(cc187-NormBPHProstate) |
| 606 | 447151 | 3574.I07.GZ43_509273 | M00084885A:C01 | chiron(cc187-NormBPHProstate) |
| 607 | 1224009 | 3574.J11.GZ43_509338 | M00084889D:G06 | chiron(cc187-NormBPHProstate) |
| 608 | 1224226 | 3574.J14.GZ43_509386 | M00084894B:F11 | chiron(cc187-NormBPHProstate) |
| 609 | 1054979 | 3574.J23.GZ43_509530 | M00084908D:B11 | chiron(cc187-NormBPHProstate) |
| 610 | 1225522 | 3574.K12.GZ43_509355 | M00084890C:A06 | chiron(cc187-NormBPHProstate) |
| 611 | 1226413 | 3574.K20.GZ43_509483 | M00084902C:F05 | chiron(cc187-NormBPHProstate) |
| 612 | 1223705 | 3574.L07.GZ43_509276 | M00084886A:C06 | chiron(cc187-NormBPHProstate) |
| 613 | 1258646 | 3574.M03.GZ43_509213 | M00084879B:E01 | chiron(cc187-NormBPHProstate) |
| 614 | 842459 | 3574.M23.GZ43_509533 | M00084908A:F03 | chiron(cc187-NormBPHProstate) |
| 615 | 1255745 | 3574.N04.GZ43_509230 | M00084880D:A10 | chiron(cc187-NormBPHProstate) |
| 616 | 652651 | 3574.N10.GZ43_509326 | M00084889B:C02 | chiron(cc187-NormBPHProstate) |
| 617 | 650715 | 3574.N12.GZ43_509358 | M00084891D:A02 | chiron(cc187-NormBPHProstate) |
| 618 | 628570 | 3574.N20.GZ43_509486 | M00084904A:D03 | chiron(cc187-NormBPHProstate) |
| 619 | 1053121 | 3574.P07.GZ43_509280 | M00084886B:D06 | chiron(cc187-NormBPHProstate) |
| 620 | 1142006 | 3574.P17.GZ43_509440 | M00084899D:B01 | chiron(cc187-NormBPHProstate) |
| 621 | 1226862 | 3577.A06.GZ43_509633 | M00084909C:G02 | chiron(cc187-NormBPHProstate) |
| 622 | 945247 | 3577.A18.GZ43_509825 | M00084910D:E07 | chiron(cc187-NormBPHProstate) |
| 623 | 915012 | 3577.B12.GZ43_509730 | M00084912D:A09 | chiron(cc187-NormBPHProstate) |
| 624 | 446747 | 3577.B15.GZ43_509778 | M00084912D:G06 | chiron(cc187-NormBPHProstate) |
| 625 | 819917 | 3577.B19.GZ43_509842 | M00084913B:F05 | chiron(cc187-NormBPHProstate) |
| 626 | 1224547 | 3577.E19.GZ43_509845 | M00084919C:B04 | chiron(cc187-NormBPHProstate) |
| 627 | 1249547 | 3577.F02.GZ43_509574 | M00084919D:B08 | chiron(cc187-NormBPHProstate) |
| 628 | 357367 | 3577.G07.GZ43_509655 | M00084921C:E04 | chiron(cc187-NormBPHProstate) |
| 629 | 725438 | 3577.G13.GZ43_509751 | M00084922A:C08 | chiron(cc187-NormBPHProstate) |
| 630 | 1193819 | 3577.H06.GZ43_509640 | M00084923D:B05 | chiron(cc187-NormBPHProstate) |
| 631 | 1224378 | 3577.H08.GZ43_509672 | M00084923D:F11 | chiron(cc187-NormBPHProstate) |
| 632 | 93073 | 3577.H18.GZ43_509832 | M00084925A:B08 | chiron(cc187-NormBPHProstate) |
| 633 | 737882 | 3577.I01.GZ43_509561 | M00084925C:G01 | chiron(cc187-NormBPHProstate) |
| 634 | 453958 | 3577.I17.GZ43_509817 | M00084926B:C05 | chiron(cc187-NormBPHProstate) |
| 635 | 1076930 | 3577.J04.GZ43_509610 | M00084927A:C01 | chiron(cc187-NormBPHProstate) |
| 636 | 1259955 | 3577.K06.GZ43_509643 | M00084928D:F06 | chiron(cc187-NormBPHProstate) |
| 637 | 1195403 | 3577.K14.GZ43_509771 | M00084929C:B02 | chiron(cc187-NormBPHProstate) |
| 638 | 1224978 | 3577.K23.GZ43_509915 | M00084930B:E12 | chiron(cc187-NormBPHProstate) |
| 639 | 1249731 | 3577.L10.GZ43_509708 | M00084930D:B08 | chiron(cc187-NormBPHProstate) |
| 640 | 52939 | 3577.N10.GZ43_509710 | M00084935B:E10 | chiron(cc187-NormBPHProstate) |
| 641 | 726922 | 3577.N14.GZ43_509774 | M00084935C:E07 | chiron(cc187-NormBPHProstate) |
| 642 | 552142 | 3577.O17.GZ43_509823 | M00084937D:B04 | chiron(cc187-NormBPHProstate) |
| 643 | 1140839 | 3577.O22.GZ43_509903 | M00084938B:A11 | chiron(cc187-NormBPHProstate) |
| 644 | 1222709 | 3577.P02.GZ43_509584 | M00084938B:F12 | chiron(cc187-NormBPHProstate) |
| 645 | 640277 | 3577.P07.GZ43_509664 | M00084938C:G06 | chiron(cc187-NormBPHProstate) |
| 646 | 654848 | 3577.P23.GZ43_509920 | M00084940B:F06 | chiron(cc187-NormBPHProstate) |
| 647 | 1225457 | 3580.A04.GZ43_509985 | M00084941B:E07 | chiron(cc187-NormBPHProstate) |
| 648 | 525759 | 3580.A09.GZ43_510065 | M00084941C:H04 | chiron(cc187-NormBPHProstate) |
| 649 | 160112 | 3580.A13.GZ43_510129 | M00084941D:C10 | chiron(cc187-NormBPHProstate) |
| 650 | 1139522 | 3580.A14.GZ43_510145 | M00084941D:H02 | chiron(cc187-NormBPHProstate) |
| 651 | 1036845 | 3580.B01.GZ43_509938 | M00084942C:B10 | chiron(cc187-NormBPHProstate) |
| 652 | 1223907 | 3580.C01.GZ43_509939 | M00084944D:E05 | chiron(cc187-NormBPHProstate) |
| 653 | 640157 | 3580.C03.GZ43_509971 | M00084945A:D10 | chiron(cc187-NormBPHProstate) |
| 654 | 1132413 | 3580.C05.GZ43_510003 | M00084945A:H10 | chiron(cc187-NormBPHProstate) |
| 655 | 621702 | 3580.D07.GZ43_510036 | M00084946D:H05 | chiron(cc187-NormBPHProstate) |
| 656 | 1227862 | 3580.D22.GZ43_510276 | M00084948B:F04 | chiron(cc187-NormBPHProstate) |
| 657 | 991366 | 3580.E02.GZ43_509957 | M00084948D:B08 | chiron(cc187-NormBPHProstate) |
| 658 | 439297 | 3580.E08.GZ43_510053 | M00084949B:B12 | chiron(cc187-NormBPHProstate) |
| 659 | 416687 | 3580.E10.GZ43_510085 | M00084949B:H11 | chiron(cc187-NormBPHProstate) |
| 660 | 1074909 | 3580.E19.GZ43_510229 | M00084950D:A06 | chiron(cc187-NormBPHProstate) |
| 661 | 1227862 | 3580.E21.GZ43_510261 | M00084950D:F05 | chiron(cc187-NormBPHProstate) |
| 662 | 566548 | 3580.E23.GZ43_510293 | M00084951A:D04 | chiron(cc187-NormBPHProstate) |
| 663 | 404121 | 3580.G03.GZ43_509975 | M00084953D:D03 | chiron(cc187-NormBPHProstate) |
| 664 | 828695 | 3580.G13.GZ43_510135 | M00084954C:A03 | chiron(cc187-NormBPHProstate) |
| 665 | 617629 | 3580.G14.GZ43_510151 | M00084954C:B12 | chiron(cc187-NormBPHProstate) |
| 666 | 453657 | 3580.G18.GZ43_510215 | M00084954D:A05 | chiron(cc187-NormBPHProstate) |
| 667 | 548217 | 3580.G19.GZ43_510231 | M00084954D:D12 | chiron(cc187-NormBPHProstate) |
| 668 | 453582 | 3580.G20.GZ43_510247 | M00084954D:E01 | chiron(cc187-NormBPHProstate) |
| 669 | 1139883 | 3580.G24.GZ43_510311 | M00084955A:E08 | chiron(cc187-NormBPHProstate) |
| 670 | 1122528 | 3580.H12.GZ43_510120 | M00084956B:B05 | chiron(cc187-NormBPHProstate) |
| 671 | 168225 | 3580.H16.GZ43_510184 | M00084956C:G09 | chiron(cc187-NormBPHProstate) |
| 672 | 1074160 | 3580.H22.GZ43_510280 | M00084957B:H07 | chiron(cc187-NormBPHProstate) |
| 673 | 1106730 | 3580.I06.GZ43_510025 | M00084958B:E10 | chiron(cc187-NormBPHProstate) |
| 674 | 1068036 | 3580.I08.GZ43_510057 | M00084958C:B03 | chiron(cc187-NormBPHProstate) |
| 675 | 1141753 | 3580.I18.GZ43_510217 | M00084959B:C07 | chiron(cc187-NormBPHProstate) |
| 676 | 649117 | 3580.J10.GZ43_510090 | M00084960D:D02 | chiron(cc187-NormBPHProstate) |
| 677 | 1227913 | 3580.J12.GZ43_510122 | M00084961A:C07 | chiron(cc187-NormBPHProstate) |
| 678 | 399738 | 3580.J18.GZ43_510218 | M00084961C:A06 | chiron(cc187-NormBPHProstate) |
| 679 | 501556 | 3580.J20.GZ43_510250 | M00084961C:F01 | chiron(cc187-NormBPHProstate) |
| 680 | 17075 | 3580.J21.GZ43_510266 | M00084961D:H03 | chiron(cc187-NormBPHProstate) |
| 681 | 532062 | 3580.K03.GZ43_509979 | M00084962C:F10 | chiron(cc187-NormBPHProstate) |
| 682 | 408711 | 3580.K05.GZ43_510011 | M00084963D:D07 | chiron(cc187-NormBPHProstate) |
| 683 | 640696 | 3580.K21.GZ43_510267 | M00084966A:A08 | chiron(cc187-NormBPHProstate) |
| 684 | 1136972 | 3580.L09.GZ43_510076 | M00084967B:B10 | chiron(cc187-NormBPHProstate) |
| 685 | 849333 | 3580.L10.GZ43_510092 | M00084967B:D09 | chiron(cc187-NormBPHProstate) |
| 686 | 1222709 | 3580.L12.GZ43_510124 | M00084967C:D10 | chiron(cc187-NormBPHProstate) |
| 687 | 738525 | 3580.L13.GZ43_510140 | M00084967C:D12 | chiron(cc187-NormBPHProstate) |
| 688 | 1053121 | 3580.L17.GZ43_510204 | M00084968A:D01 | chiron(cc187-NormBPHProstate) |
| 689 | 1226323 | 3580.M01.GZ43_509949 | M00084968C:D10 | chiron(cc187-NormBPHProstate) |
| 690 | 707590 | 3580.M16.GZ43_510189 | M00084969C:F03 | chiron(cc187-NormBPHProstate) |
| 691 | 376659 | 3580.M17.GZ43_510205 | M00084969C:H11 | chiron(cc187-NormBPHProstate) |
| 692 | 637915 | 3580.M18.GZ43_510221 | M00084969D:C11 | chiron(cc187-NormBPHProstate) |
| 693 | 1059445 | 3580.M23.GZ43_510301 | M00084970A:C11 | chiron(cc187-NormBPHProstate) |
| 694 | 1138419 | 3580.N10.GZ43_510094 | M00084970C:G03 | chiron(cc187-NormBPHProstate) |
| 695 | 1226494 | 3580.N11.GZ43_510110 | M00084970C:H09 | chiron(cc187-NormBPHProstate) |
| 696 | 427904 | 3580.N14.GZ43_510158 | M00084970D:B01 | chiron(cc187-NormBPHProstate) |
| 697 | 450882 | 3580.N15.GZ43_510174 | M00084970D:E08 | chiron(cc187-NormBPHProstate) |
| 698 | 961757 | 3580.N23.GZ43_510302 | M00084971C:G07 | chiron(cc187-NormBPHProstate) |
| 699 | 1060021 | 3580.O02.GZ43_509967 | M00084972B:H03 | chiron(cc187-NormBPHProstate) |
| 700 | 378629 | 3580.O06.GZ43_510031 | M00084973A:A01 | chiron(cc187-NormBPHProstate) |
| 701 | 12420 | 3580.O07.GZ43_510047 | M00084973A:B06 | chiron(cc187-NormBPHProstate) |
| 702 | 1138997 | 3580.O08.GZ43_510063 | M00084973A:C01 | chiron(cc187-NormBPHProstate) |
| 703 | 843831 | 3580.P04.GZ43_510000 | M00084974D:F11 | chiron(cc187-NormBPHProstate) |
| 704 | 862823 | 3580.P05.GZ43_510016 | M00084975A:G05 | chiron(cc187-NormBPHProstate) |
| 705 | 836879 | 3580.P14.GZ43_510160 | M00084976B:A08 | chiron(cc187-NormBPHProstate) |
| 706 | 1226267 | 3580.P19.GZ43_510240 | M00084976C:C12 | chiron(cc187-NormBPHProstate) |
| 707 | 725438 | 3583.B06.GZ43_510402 | M00084980C:B07 | chiron(cc187-NormBPHProstate) |
| 708 | 613411 | 3583.B07.GZ43_510418 | M00084980C:E06 | chiron(cc187-NormBPHProstate) |
| 709 | 861025 | 3583.B10.GZ43_510466 | M00084980D:D02 | chiron(cc187-NormBPHProstate) |
| 710 | 557717 | 3583.B11.GZ43_510482 | M00084980D:H08 | chiron(cc187-NormBPHProstate) |
| 711 | 400407 | 3583.D15.GZ43_510548 | M00084987A:D09 | chiron(cc187-NormBPHProstate) |
| 712 | 1193454 | 3583.D22.GZ43_510660 | M00084987B:H12 | chiron(cc187-NormBPHProstate) |
| 713 | 1064975 | 3583.E11.GZ43_510485 | M00084988B:B08 | chiron(cc187-NormBPHProstate) |
| 714 | 777670 | 3583.E13.GZ43_510517 | M00084988C:A04 | chiron(cc187-NormBPHProstate) |
| 715 | 1085645 | 3583.E15.GZ43_510549 | M00084988C:B01 | chiron(cc187-NormBPHProstate) |
| 716 | 509673 | 3583.E17.GZ43_510581 | M00084988C:G03 | chiron(cc187-NormBPHProstate) |
| 717 | 1118651 | 3583.F24.GZ43_510694 | M00084992D:B02 | chiron(cc187-NormBPHProstate) |
| 718 | 1119139 | 3583.G09.GZ43_510455 | M00084994A:H04 | chiron(cc187-NormBPHProstate) |
| 719 | 708025 | 3583.G16.GZ43_510567 | M00084994D:F11 | chiron(cc187-NormBPHProstate) |
| 720 | 698307 | 3583.G17.GZ43_510583 | M00084994D:H04 | chiron(cc187-NormBPHProstate) |
| 721 | 537118 | 3583.G21.GZ43_510647 | M00084995B:B08 | chiron(cc187-NormBPHProstate) |
| 722 | 447731 | 3583.H03.GZ43_510360 | M00084996B:D08 | chiron(cc187-NormBPHProstate) |
| 723 | 1226484 | 3583.H12.GZ43_510504 | M00084997D:H09 | chiron(cc187-NormBPHProstate) |
| 724 | 1059968 | 3583.H13.GZ43_510520 | M00084998A:C12 | chiron(cc187-NormBPHProstate) |
| 725 | 494499 | 3583.H15.GZ43_510552 | M00084998B:A04 | chiron(cc187-NormBPHProstate) |
| 726 | 496962 | 3583.J02.GZ43_510346 | M00085003C:D03 | chiron(cc187-NormBPHProstate) |
| 727 | 492489 | 3583.K08.GZ43_510443 | M00085006C:C07 | chiron(cc187-NormBPHProstate) |
| 728 | 1116503 | 3583.K10.GZ43_510475 | M00085006D:C10 | chiron(cc187-NormBPHProstate) |
| 729 | 552036 | 3583.K11.GZ43_510491 | M00085006D:C04 | chiron(cc187-NormBPHProstate) |
| 730 | 501556 | 3583.K14.GZ43_510539 | M00085007A:B03 | chiron(cc187-NormBPHProstate) |
| 731 | 164618 | 3583.K17.GZ43_510587 | M00085007B:C07 | chiron(cc187-NormBPHProstate) |
| 732 | 1274759 | 3583.K23.GZ43_510683 | M00085008B:H11 | chiron(cc187-NormBPHProstate) |
| 733 | 404308 | 3583.L05.GZ43_510396 | M00085009B:F10 | chiron(cc187-NormBPHProstate) |
| 734 | 234586 | 3583.L08.GZ43_510444 | M00085009C:C01 | chiron(cc187-NormBPHProstate) |
| 735 | 649117 | 3583.L09.GZ43_510460 | M00085009D:A02 | chiron(cc187-NormBPHProstate) |
| 736 | 353528 | 3583.L17.GZ43_510588 | M00085010C:H01 | chiron(cc187-NormBPHProstate) |
| 737 | 94413 | 3583.L21.GZ43_510652 | M00085011B:A01 | chiron(cc187-NormBPHProstate) |
| 738 | 401424 | 3583.M08.GZ43_510445 | M00085012C:A08 | chiron(cc187-NormBPHProstate) |
| 739 | 416470 | 3583.M10.GZ43_510477 | M00085012C:D06 | chiron(cc187-NormBPHProstate) |
| 740 | 380205 | 3583.M13.GZ43_510525 | M00085013A:E06 | chiron(cc187-NormBPHProstate) |
| 741 | 1054069 | 3583.N09.GZ43_510462 | M00085015A:C09 | chiron(cc187-NormBPHProstate) |
| 742 | 836879 | 3583.O03.GZ43_510367 | M00085017C:A11 | chiron(cc187-NormBPHProstate) |
| 743 | 451505 | 3583.O11.GZ43_510495 | M00085018C:B09 | chiron(cc187-NormBPHProstate) |
| 744 | 747805 | 3583.O17.GZ43_510591 | M00085019C:D05 | chiron(cc187-NormBPHProstate) |
| 745 | 1110143 | 3583.P09.GZ43_510464 | M00085021C:F06 | chiron(cc187-NormBPHProstate) |
| 746 | 821536 | 3583.P19.GZ43_510624 | M00085022B:B03 | chiron(cc187-NormBPHProstate) |
| 747 | 234667 | 3583.P22.GZ43_510672 | M00085022B:F05 | chiron(cc187-NormBPHProstate) |
| 748 | 1269942 | 3590.A12.GZ43_512274 | M00085023D:E11 | chiron(cc187-NormBPHProstate) |
| 749 | 1224593 | 3590.B01.GZ43_512099 | M00085025A:D11 | chiron(cc187-NormBPHProstate) |
| 750 | 386612 | 3590.B16.GZ43_512339 | M00085026D:A01 | chiron(cc187-NormBPHProstate) |
| 751 | 1250581 | 3590.B21.GZ43_512419 | M00085027A:C02 | chiron(cc187-NormBPHProstate) |
| 752 | 557063 | 3590.C20.GZ43_512404 | M00085029A:C02 | chiron(cc187-NormBPHProstate) |
| 753 | 1136977 | 3590.D03.GZ43_512133 | M00085029D:E12 | chiron(cc187-NormBPHProstate) |
| 754 | 18225 | 3590.D19.GZ43_512389 | M00085031B:E03 | chiron(cc187-NormBPHProstate) |
| 755 | 727730 | 3590.D23.GZ43_512453 | M00085031C:D05 | chiron(cc187-NormBPHProstate) |
| 756 | 1224704 | 3590.E08.GZ43_512214 | M00085032C:F04 | chiron(cc187-NormBPHProstate) |
| 757 | 1250660 | 3590.E10.GZ43_512246 | M00085032D:C03 | chiron(cc187-NormBPHProstate) |
| 758 | 846920 | 3590.F01.GZ43_512103 | M00085034B:E11 | chiron(cc187-NormBPHProstate) |
| 759 | 965814 | 3590.F16.GZ43_512343 | M00085035B:C12 | chiron(cc187-NormBPHProstate) |
| 760 | 439297 | 3590.G01.GZ43_512104 | M00085035D:D09 | chiron(cc187-NormBPHProstate) |
| 761 | 746389 | 3590.G02.GZ43_512120 | M00085035D:E04 | chiron(cc187-NormBPHProstate) |
| 762 | 677434 | 3590.H04.GZ43_512153 | M00085038A:B10 | chiron(cc187-NormBPHProstate) |
| 763 | 1055089 | 3590.H06.GZ43_512185 | M00085038A:C06 | chiron(cc187-NormBPHProstate) |
| 764 | 772985 | 3590.H09.GZ43_512233 | M00085038D:D10 | chiron(cc187-NormBPHProstate) |
| 765 | 624971 | 3590.H12.GZ43_512281 | M00085039B:E09 | chiron(cc187-NormBPHProstate) |
| 766 | 689639 | 3590.H16.GZ43_512345 | M00085039D:F09 | chiron(cc187-NormBPHProstate) |
| 767 | 1226488 | 3590.I16.GZ43_512346 | M00085047A:H02 | chiron(cc187-NormBPHProstate) |
| 768 | 403488 | 3590.J01.GZ43_512107 | M00085047D:F03 | chiron(cc187-NormBPHProstate) |
| 769 | 915012 | 3590.J02.GZ43_512123 | M00085047D:F08 | chiron(cc187-NormBPHProstate) |
| 770 | 1014734 | 3590.J18.GZ43_512379 | M00085049B:E03 | chiron(cc187-NormBPHProstate) |
| 771 | 1798 | 3590.J21.GZ43_512427 | M00085050A:B06 | chiron(cc187-NormBPHProstate) |
| 772 | 611592 | 3590.J22.GZ43_512443 | M00085050A:E11 | chiron(cc187-NormBPHProstate) |
| 773 | 374853 | 3590.K06.GZ43_512188 | M00085051A:G03 | chiron(cc187-NormBPHProstate) |
| 774 | 594116 | 3590.K10.GZ43_512252 | M00085051C:A01 | chiron(cc187-NormBPHProstate) |
| 775 | 551891 | 3590.K19.GZ43_512396 | M00085052B:E04 | chiron(cc187-NormBPHProstate) |
| 776 | 389995 | 3590.L08.GZ43_512221 | M00085053C:D07 | chiron(cc187-NormBPHProstate) |
| 777 | 483918 | 3590.L10.GZ43_512253 | M00085053D:D04 | chiron(cc187-NormBPHProstate) |
| 778 | 411960 | 3590.M03.GZ43_512142 | M00085056A:G12 | chiron(cc187-NormBPHProstate) |
| 779 | 532062 | 3590.M04.GZ43_512158 | M00085056B:B06 | chiron(cc187-NormBPHProstate) |
| 780 | 942200 | 3590.M09.GZ43_512238 | M00085056D:B12 | chiron(cc187-NormBPHProstate) |
| 781 | 470698 | 3590.N04.GZ43_512159 | M00085058A:H02 | chiron(cc187-NormBPHProstate) |
| 782 | 1088402 | 3590.N19.GZ43_512399 | M00085059B:H11 | chiron(cc187-NormBPHProstate) |
| 783 | 1226304 | 3590.N21.GZ43_512431 | M00085059B:H07 | chiron(cc187-NormBPHProstate) |
| 784 | 869453 | 3590.O08.GZ43_512224 | M00085060B:C05 | chiron(cc187-NormBPHProstate) |
| 785 | 737502 | 3596.C02.GZ43_512500 | M00085121A:D10 | chiron(cc187-NormBPHProstate) |
| 786 | 404418 | 3596.C20.GZ43_512788 | M00085123A:E07 | chiron(cc187-NormBPHProstate) |
| 787 | 404418 | 3596.C22.GZ43_512820 | M00085123B:C04 | chiron(cc187-NormBPHProstate) |
| 788 | 555967 | 3596.D01.GZ43_512485 | M00085123C:G11 | chiron(cc187-NormBPHProstate) |
| 789 | 1184134 | 3596.D07.GZ43_512581 | M00085124A:G04 | chiron(cc187-NormBPHProstate) |
| 790 | 89833 | 3596.D09.GZ43_512613 | M00085124B:G05 | chiron(cc187-NormBPHProstate) |
| 791 | 494890 | 3596.D17.GZ43_512741 | M00085125C:H06 | chiron(cc187-NormBPHProstate) |
| 792 | 401166 | 3596.E08.GZ43_512598 | M00085127C:C03 | chiron(cc187-NormBPHProstate) |
| 793 | 645986 | 3596.E22.GZ43_512822 | M00085129B:C02 | chiron(cc187-NormBPHProstate) |
| 794 | 1225870 | 3596.F10.GZ43_512631 | M00085131D:A06 | chiron(cc187-NormBPHProstate) |
| 795 | 269829 | 3596.G13.GZ43_512680 | M00085141C:G06 | chiron(cc187-NormBPHProstate) |
| 796 | 722878 | 3596.H04.GZ43_512537 | M00085142D:F04 | chiron(cc187-NormBPHProstate) |
| 797 | 454612 | 3596.H10.GZ43_512633 | M00085143C:D05 | chiron(cc187-NormBPHProstate) |
| 798 | 642869 | 3596.H17.GZ43_512745 | M00085144B:C12 | chiron(cc187-NormBPHProstate) |
| 799 | 770834 | 3596.H22.GZ43_512825 | M00085144D:G03 | chiron(cc187-NormBPHProstate) |
| 800 | 1189027 | 3596.I06.GZ43_512570 | M00085145C:D02 | chiron(cc187-NormBPHProstate) |
| 801 | 1189027 | 3596.I16.GZ43_512730 | M00085146B:C01 | chiron(cc187-NormBPHProstate) |
| 802 | 1189618 | 3596.J04.GZ43_512539 | M00085147C:A04 | chiron(cc187-NormBPHProstate) |
| 803 | 777670 | 3596.J13.GZ43_512683 | M00085148B:H01 | chiron(cc187-NormBPHProstate) |
| 804 | 1226243 | 3596.K14.GZ43_512700 | M00085151A:B04 | chiron(cc187-NormBPHProstate) |
| 805 | 1226510 | 3596.K15.GZ43_512716 | M00085151A:H09 | chiron(cc187-NormBPHProstate) |
| 806 | 517007 | 3596.L01.GZ43_512493 | M00085152B:A06 | chiron(cc187-NormBPHProstate) |
| 807 | 1070898 | 3596.L08.GZ43_512605 | M00085155B:F10 | chiron(cc187-NormBPHProstate) |
| 808 | 1117392 | 3596.L13.GZ43_512685 | M00085156A:G04 | chiron(cc187-NormBPHProstate) |
| 809 | 1227356 | 3596.N02.GZ43_512511 | M00085164C:G05 | chiron(cc187-NormBPHProstate) |
| 810 | 1042918 | 3596.N12.GZ43_512671 | M00085166C:A08 | chiron(cc187-NormBPHProstate) |
| 811 | 552432 | 3596.N15.GZ43_512719 | M00085166D:C10 | chiron(cc187-NormBPHProstate) |
| 812 | 585099 | 3596.N16.GZ43_512735 | M00085167A:G02 | chiron(cc187-NormBPHProstate) |
| 813 | 222216 | 3596.N21.GZ43_512815 | M00085167C:D06 | chiron(cc187-NormBPHProstate) |
| 814 | 650520 | 3596.O10.GZ43_512640 | M00085168D:D04 | chiron(cc187-NormBPHProstate) |
| 815 | 557717 | 3596.O12.GZ43_512672 | M00085169A:H12 | chiron(cc187-NormBPHProstate) |
| 816 | 90 | 3596.P03.GZ43_512529 | M00085171D:F05 | chiron(cc187-NormBPHProstate) |
| 817 | 747805 | 3596.P04.GZ43_512545 | M00085172A:G05 | chiron(cc187-NormBPHProstate) |
| 818 | 459967 | 3596.P07.GZ43_512593 | M00085172C:F06 | chiron(cc187-NormBPHProstate) |
| 819 | 454692 | 3596.P08.GZ43_512609 | M00085173A:B07 | chiron(cc187-NormBPHProstate) |
| 820 | 12420 | 3596.P10.GZ43_512641 | M00085173B:A08 | chiron(cc187-NormBPHProstate) |
| 821 | 1129928 | 3596.P21.GZ43_512817 | M00085175B:A03 | chiron(cc187-NormBPHProstate) |
| 822 | 7944 | 3599.A04.GZ43_512914 | M00085176C:B11 | chiron(cc187-NormBPHProstate) |
| 823 | 637367 | 3599.A23.GZ43_513218 | M00085178D:F01 | chiron(cc187-NormBPHProstate) |
| 824 | 1227253 | 3599.B15.GZ43_513091 | M00085182B:E04 | chiron(cc187-NormBPHProstate) |
| 825 | 1053861 | 3599.B16.GZ43_513107 | M00085182B:H10 | chiron(cc187-NormBPHProstate) |
| 826 | 401354 | 3599.C03.GZ43_512900 | M00085184D:B08 | chiron(cc187-NormBPHProstate) |
| 827 | 1117392 | 3599.C17.GZ43_513124 | M00085187B:C11 | chiron(cc187-NormBPHProstate) |
| 828 | 1116992 | 3599.D03.GZ43_512901 | M00085190B:C09 | chiron(cc187-NormBPHProstate) |
| 829 | 832148 | 3599.D05.GZ43_512933 | M00085190B:H04 | chiron(cc187-NormBPHProstate) |
| 830 | 1081548 | 3599.D07.GZ43_512965 | M00085190C:D10 | chiron(cc187-NormBPHProstate) |
| 831 | 1138578 | 3599.D10.GZ43_513013 | M00085191A:B03 | chiron(cc187-NormBPHProstate) |
| 832 | 847395 | 3599.E01.GZ43_512870 | M00085194C:B12 | chiron(cc187-NormBPHProstate) |
| 833 | 11683 | 3599.E05.GZ43_512934 | M00085194D:F04 | chiron(cc187-NormBPHProstate) |
| 834 | 1227623 | 3599.F17.GZ43_513127 | M00085201C:C12 | chiron(cc187-NormBPHProstate) |
| 835 | 555967 | 3599.F24.GZ43_513239 | M00085203A:E06 | chiron(cc187-NormBPHProstate) |
| 836 | 1226814 | 3599.H05.GZ43_512937 | M00085209C:F11 | chiron(cc187-NormBPHProstate) |
| 837 | 1227846 | 3599.H23.GZ43_513225 | M00085214D:G01 | chiron(cc187-NormBPHProstate) |
| 838 | 1226751 | 3599.J11.GZ43_513035 | M00085220D:E06 | chiron(cc187-NormBPHProstate) |
| 839 | 90 | 3599.K02.GZ43_512892 | M00085222D:D07 | chiron(cc187-NormBPHProstate) |
| 840 | 89833 | 3599.K04.GZ43_512924 | M00085223A:G01 | chiron(cc187-NormBPHProstate) |
| 841 | 854573 | 3599.K23.GZ43_513228 | M00085226C:F08 | chiron(cc187-NormBPHProstate) |
| 842 | 1066041 | 3599.L04.GZ43_512925 | M00085228B:C10 | chiron(cc187-NormBPHProstate) |
| 843 | 42285 | 3599.L15.GZ43_513101 | M00085229B:C10 | chiron(cc187-NormBPHProstate) |
| 844 | 661802 | 3599.M04.GZ43_512926 | M00085230B:G08 | chiron(cc187-NormBPHProstate) |
| 845 | 552428 | 3599.M22.GZ43_513214 | M00085242A:C06 | chiron(cc187-NormBPHProstate) |
| 846 | 996888 | 3599.M24.GZ43_513246 | M00085243A:D07 | chiron(cc187-NormBPHProstate) |
| 847 | 555509 | 3599.N09.GZ43_513007 | M00085244C:D03 | chiron(cc187-NormBPHProstate) |
| 848 | 1080634 | 3599.N16.GZ43_513119 | M00085245C:D07 | chiron(cc187-NormBPHProstate) |
| 849 | 180092 | 3599.N20.GZ43_513183 | M00085245D:G07 | chiron(cc187-NormBPHProstate) |
| 850 | 657748 | 3599.N24.GZ43_513247 | M00085246B:G12 | chiron(cc187-NormBPHProstate) |
| 851 | 555726 | 3599.O06.GZ43_512960 | M00085247A:F05 | chiron(cc187-NormBPHProstate) |
| 852 | 1055029 | 3599.O17.GZ43_513136 | M00085248B:G12 | chiron(cc187-NormBPHProstate) |
| 853 | 427182 | 3599.P05.GZ43_512945 | M00085249C:C11 | chiron(cc187-NormBPHProstate) |
| 854 | 1228277 | 3602.A09.GZ43_513378 | M00085252B:H07 | chiron(cc187-NormBPHProstate) |
| 855 | 1142632 | 3602.B18.GZ43_513523 | M00085255B:F11 | chiron(cc187-NormBPHProstate) |
| 856 | 1108332 | 3602.B21.GZ43_513571 | M00085255D:B09 | chiron(cc187-NormBPHProstate) |
| 857 | 734568 | 3602.B22.GZ43_513587 | M00085255D:E12 | chiron(cc187-NormBPHProstate) |
| 858 | 1085638 | 3602.C24.GZ43_513620 | M00085259A:H05 | chiron(cc187-NormBPHProstate) |
| 859 | 1136721 | 3602.D06.GZ43_513333 | M00085259D:B06 | chiron(cc187-NormBPHProstate) |
| 860 | 1284683 | 3602.D11.GZ43_513413 | M00085260C:A10 | chiron(cc187-NormBPHProstate) |
| 861 | 935460 | 3602.E04.GZ43_513302 | M00085262A:A02 | chiron(cc187-NormBPHProstate) |
| 862 | 425824 | 3602.E06.GZ43_513334 | M00085262C:E04 | chiron(cc187-NormBPHProstate) |
| 863 | 430201 | 3602.E13.GZ43_513446 | M00085263C:F12 | chiron(cc187-NormBPHProstate) |
| 864 | 646935 | 3602.E21.GZ43_513574 | M00085264C:F04 | chiron(cc187-NormBPHProstate) |
| 865 | 1064963 | 3602.F12.GZ43_513431 | M00083691C:E12 | chiron(cc187- |
| | | | | ProstateCancer4 + 4) |
| 866 | 1129928 | 3602.G03.GZ43_513288 | M00083692C:D09 | chiron(cc187- |
| | | | | ProstateCancer4 + 4) |
| 867 | 585099 | 3602.G17.GZ43_513512 | M00083694C:F09 | chiron(cc187- |
| | | | | ProstateCancer4 + 4) |
| 868 | 1194085 | 3602.I07.GZ43_513354 | M00083698B:H01 | chiron(cc187- |
| | | | | ProstateCancer4 + 4) |
| 869 | 993 | 3602.I11.GZ43_513418 | M00083698D:E01 | chiron(cc187- |
| | | | | ProstateCancer4 + 4) |
| 870 | 3123 | 3602.I15.GZ43_513482 | M00083699B:C12 | chiron(cc187- |
| | | | | ProstateCancer4 + 4) |
| 871 | 1193689 | 3602.J13.GZ43_513451 | M00083701D:G09 | chiron(cc187- |
| | | | | ProstateCancer4 + 4) |
| 872 | 19777 | 3602.K03.GZ43_513292 | M00083704C:C04 | chiron(cc187- |
| | | | | ProstateCancer4 + 4) |
| 873 | 637367 | 3602.K06.GZ43_513340 | M00083706A:D02 | chiron(cc187- |
| | | | | ProstateCancer4 + 4) |
| 874 | 13709 | 3602.L20.GZ43_513565 | M00083710D:B09 | chiron(cc187- |
| | | | | ProstateCancer4 + 4) |
| 875 | 1131409 | 3602.N03.GZ43_513295 | M00083714C:F04 | chiron(cc187- |
| | | | | ProstateCancer4 + 4) |
| 876 | 454733 | 3602.N06.GZ43_513343 | M00083715A:B11 | chiron(cc187- |
| | | | | ProstateCancer4 + 4) |
| 877 | 454349 | 3605.A15.gz43_513858 | M00083722B:A07 | chiron(cc187- |
| | | | | ProstateCancer4 + 4) |
| 878 | 1250995 | 3605.C16.gz43_513876 | M00083726B:E07 | chiron(cc187- |
| | | | | ProstateCancer4 + 4) |
| 879 | 1132413 | 3605.E19.gz43_513926 | M00083729C:F10 | chiron(cc187- |
| | | | | ProstateCancer4 + 4) |
| 880 | 397313 | 3605.G13.gz43_513832 | M00083733B:D08 | chiron(cc187- |
| | | | | ProstateCancer4 + 4) |
| 881 | 1292281 | 3605.H10.gz43_513785 | M00083735C:H12 | chiron(cc187- |
| | | | | ProstateCancer4 + 4) |
| 882 | 1248861 | 3605.H21.gz43_513961 | M00083736A:D10 | chiron(cc187- |
| | | | | ProstateCancer4 + 4) |
| 883 | 1292262 | 3605.I19.gz43_513930 | M00083738C:D05 | chiron(cc187- |
| | | | | ProstateCancer4 + 4) |
| 884 | 496233 | 3605.J16.gz43_513883 | M00083740C:G01 | chiron(cc187- |
| | | | | ProstateCancer4 + 4) |
| 885 | 1053793 | 3605.K19.gz43_513932 | M00083745A:A10 | chiron(cc187- |
| | | | | ProstateCancer4 + 4) |
| 886 | 734568 | 3605.M17.gz43_513902 | M00083749D:B09 | chiron(cc187- |
| | | | | ProstateCancer4 + 4) |
| 887 | 396320 | 3605.N04.gz43_513695 | M00083750D:G12 | chiron(cc187- |
| | | | | ProstateCancer4 + 4) |
| 888 | 453522 | 3605.N09.gz43_513775 | M00085266B:C06 | chiron(cc187- |
| | | | | ProstateCancer4 + 4) |
| 889 | 418320 | 3605.N12.gz43_513823 | M00085266D:C09 | chiron(cc187- |
| | | | | ProstateCancer4 + 4) |
| 890 | 1053747 | 3605.N16.gz43_513887 | M00085267B:D06 | chiron(cc187- |
| | | | | ProstateCancer4 + 4) |
| 891 | 644687 | 3608.B06.gz43_514099 | M00085282C:F05 | chiron(cc187- |
| | | | | ProstateCancer4 + 4) |
| 892 | 845354 | 3608.B12.gz43_514195 | M00085293B:B05 | chiron(cc187- |
| | | | | ProstateCancer4 + 4) |
| 893 | 850335 | 3608.B24.gz43_514387 | M00085273A:A09 | chiron(cc187- |
| | | | | ProstateCancer4 + 4) |
| 894 | 842459 | 3608.C18.gz43_514292 | M00085301C:H11 | chiron(cc187- |
| | | | | ProstateCancer4 + 4) |
| 895 | 653817 | 3608.E17.gz43_514278 | M00085299B:G01 | chiron(cc187- |
| | | | | ProstateCancer4 + 4) |
| 896 | 257547 | 3608.E20.gz43_514326 | M00085304B:D11 | chiron(cc187- |
| | | | | ProstateCancer4 + 4) |
| 897 | 1227454 | 3608.F13.gz43_514215 | M00085294D:G03 | chiron(cc187- |
| | | | | ProstateCancer4 + 4) |
| 898 | 1053854 | 3608.G09.gz43_514152 | M00085287C:G08 | chiron(cc187- |
| | | | | ProstateCancer4 + 4) |
| 899 | 1253234 | 3608.H05.gz43_514089 | M00085280D:F06 | chiron(cc187- |
| | | | | ProstateCancer4 + 4) |
| 900 | 1255330 | 3608.H14.gz43_514233 | M00085296D:H10 | chiron(cc187- |
| | | | | ProstateCancer4 + 4) |
| 901 | 974635 | 3608.H18.gz43_514297 | M00085302C:B06 | chiron(cc187- |
| | | | | ProstateCancer4 + 4) |
| 902 | 872646 | 3608.J17.gz43_514283 | M00085301B:C10 | chiron(cc187- |
| | | | | ProstateCancer4 + 4) |
| 903 | 939445 | 3608.J24.gz43_514395 | M00085273B:F08 | chiron(cc187- |
| | | | | ProstateCancer4 + 4) |
| 904 | 775820 | 3608.K03.gz43_514060 | M00085277D:C11 | chiron(cc187- |
| | | | | ProstateCancer4 + 4) |
| 905 | 452477 | 3608.K14.gz43_514236 | M00085296C:C09 | chiron(cc187- |
| | | | | ProstateCancer4 + 4) |
| 906 | 654848 | 3608.L07.gz43_514125 | M00085284D:A09 | chiron(cc187- |
| | | | | ProstateCancer4 + 4) |
| 907 | 1225734 | 3608.L14.gz43_514237 | M00085297A:A11 | chiron(cc187- |
| | | | | ProstateCancer4 + 4) |
| 908 | 404197 | 3608.N09.gz43_514159 | M00085288C:C09 | chiron(cc187- |
| | | | | ProstateCancer4 + 4) |
| 909 | 866237 | 3608.N19.gz43_514319 | M00085304A:B11 | chiron(cc187- |
| | | | | ProstateCancer4 + 4) |
| 910 | 650263 | 3608.N20.gz43_514335 | M00085305B:F10 | chiron(cc187- |
| | | | | ProstateCancer4 + 4) |
| 911 | 1141371 | 3608.O04.gz43_514080 | M00085278D:F03 | chiron(cc187- |
| | | | | ProstateCancer4 + 4) |
| 912 | 1257583 | 3608.P22.gz43_514369 | M00085309A:D11 | chiron(cc187- |
| | | | | ProstateCancer4 + 4) |
| 913 | 1252475 | 3611.A17.gz43_514658 | M00085312C:B09 | chiron(cc187- |
| | | | | ProstateCancer4 + 4) |
| 914 | 386255 | 3611.B11.gz43_514563 | M00085314C:F01 | chiron(cc187- |
| | | | | ProstateCancer4 + 4) |
| 915 | 1079196 | 3611.B16.gz43_514643 | M00085315C:B03 | chiron(cc187- |
| | | | | ProstateCancer4 + 4) |
| 916 | 1258456 | 3611.C09.gz43_514532 | M00085317B:G09 | chiron(cc187- |
| | | | | ProstateCancer4 + 4) |
| 917 | 403488 | 3611.E07.gz43_514502 | M00085322D:G05 | chiron(cc187- |
| | | | | ProstateCancer4 + 4) |
| 918 | 857031 | 3611.E12.gz43_514582 | M00085323C:H07 | chiron(cc187- |
| | | | | ProstateCancer4 + 4) |
| 919 | 1292600 | 3611.E20.gz43_514710 | M00085324B:F10 | chiron(cc187- |
| | | | | ProstateCancer4 + 4) |
| 920 | 1226862 | 3611.F15.gz43_514631 | M00085326B:D08 | chiron(cc187- |
| | | | | ProstateCancer4 + 4) |
| 921 | 857031 | 3611.H10.gz43_514553 | M00085331C:C07 | chiron(cc187- |
| | | | | ProstateCancer4 + 4) |
| 922 | 1292298 | 3611.H22.gz43_514745 | M00085332D:B03 | chiron(cc187- |
| | | | | ProstateCancer4 + 4) |
| 923 | 1183079 | 3611.I04.gz43_514458 | M00085333B:B10 | chiron(cc187- |
| | | | | ProstateCancer4 + 4) |
| 924 | 1258011 | 3611.I13.gz43_514602 | M00085334A:D10 | chiron(cc187- |
| | | | | ProstateCancer4 + 4) |
| 925 | 677858 | 3611.J04.gz43_514459 | M00085335B:D09 | chiron(cc187- |
| | | | | ProstateCancer4 + 4) |
| 926 | 1053747 | 3611.J15.gz43_514635 | M00085336C:G09 | chiron(cc187- |
| | | | | ProstateCancer4 + 4) |
| 927 | 404589 | 3611.J17.gz43_514667 | M00085336D:B10 | chiron(cc187- |
| | | | | ProstateCancer4 + 4) |
| 928 | 727730 | 3611.J22.gz43_514747 | M00085337B:F08 | chiron(cc187- |
| | | | | ProstateCancer4 + 4) |
| 929 | 451819 | 3611.K01.gz43_514412 | M00085337C:E09 | chiron(cc187- |
| | | | | ProstateCancer4 + 4) |
| 930 | 551691 | 3611.K12.gz43_514588 | M00085339C:C04 | chiron(cc187- |
| | | | | ProstateCancer4 + 4) |
| 931 | 1079863 | 3611.L22.gz43_514749 | M00085341C:H08 | chiron(cc187- |
| | | | | ProstateCancer4 + 4) |
| 932 | 1053747 | 3611.M18.gz43_514686 | M00085344A:G08 | chiron(cc187- |
| | | | | ProstateCancer4 + 4) |
| 933 | 1255745 | 3611.M24.gz43_514782 | M00085344D:B07 | chiron(cc187- |
| | | | | ProstateCancer4 + 4) |
| 934 | 1254418 | 3611.N01.gz43_514415 | M00085344D:F01 | chiron(cc187- |
| | | | | ProstateCancer4 + 4) |
| 935 | 504038 | 3611.N09.gz43_514543 | M00085345B:C09 | chiron(cc187- |
| | | | | ProstateCancer4 + 4) |
| 936 | 974223 | 3611.O16.gz43_514656 | M00085349A:C08 | chiron(cc187- |
| | | | | ProstateCancer4 + 4) |
| 937 | 1223936 | 3611.P08.gz43_514529 | M00085350D:G05 | chiron(cc187- |
| | | | | ProstateCancer4 + 4) |
| 938 | 1292289 | 3614.C18.gz43_515060 | M00085358B:A04 | chiron(cc187- |
| | | | | ProstateCancer4 + 4) |
| 939 | 1292423 | 3614.D14.gz43_514997 | M00085360B:G03 | chiron(cc187- |
| | | | | ProstateCancer4 + 4) |
| 940 | 1255745 | 3614.D21.gz43_515109 | M00085361A:A09 | chiron(cc187- |
| | | | | ProstateCancer4 + 4) |
| 941 | 1258714 | 3614.E06.gz43_514870 | M00085361D:F06 | chiron(cc187- |
| | | | | ProstateCancer4 + 4) |
| 942 | 1258491 | 3614.F22.gz43_515127 | M00085365C:C09 | chiron(cc187- |
| | | | | ProstateCancer4 + 4) |
| 943 | 1079196 | 3614.G20.gz43_515096 | M00085367B:C02 | chiron(cc187- |
| | | | | ProstateCancer4 + 4) |
| 944 | 1257531 | 3614.H09.gz43_514921 | M00085368B:A02 | chiron(cc187- |
| | | | | ProstateCancer4 + 4) |
| 945 | 1055256 | 3614.H22.gz43_515129 | M00085369D:G04 | chiron(cc187- |
| | | | | ProstateCancer4 + 4) |
| 946 | 1292439 | 3614.J07.gz43_514891 | M00085373C:B06 | chiron(cc187- |
| | | | | ProstateCancer4 + 4) |
| 947 | 761460 | 3614.K22.gz43_515132 | M00085380B:E10 | chiron(cc187- |
| | | | | ProstateCancer4 + 4) |
| 948 | 832347 | 3614.L13.gz43_514989 | M00085381C:A05 | chiron(cc187- |
| | | | | ProstateCancer4 + 4) |
| 949 | 855428 | 3614.M08.gz43_514910 | M00085383C:C05 | chiron(cc187- |
| | | | | ProstateCancer4 + 4) |
| 950 | 766134 | 3614.O02.gz43_514816 | M00085389B:B05 | chiron(cc187- |
| | | | | ProstateCancer4 + 4) |
| 951 | 875978 | 3614.O07.gz43_514896 | M00085389C:H04 | chiron(cc187- |
| | | | | ProstateCancer4 + 4) |
| 952 | 1226535 | 3614.O16.gz43_515040 | M00085390D:A03 | chiron(cc187- |
| | | | | ProstateCancer4 + 4) |
| 953 | 1204782 | 3614.P11.gz43_514961 | M00085393A:D06 | chiron(cc187- |
| | | | | ProstateCancer4 + 4) |
| 954 | 1293972 | 3614.P16.gz43_515041 | M00085393D:F12 | chiron(cc187- |
| | | | | ProstateCancer4 + 4) |
| 955 | 849333 | 3617.B16.gz43_515411 | M00085434C:G06 | chiron(cc187- |
| | | | | ProstateCancer4 + 4) |
| 956 | 721489 | 3617.C21.gz43_515492 | M00085444C:C02 | chiron(cc187- |
| | | | | ProstateCancer4 + 4) |
| 957 | 397313 | 3617.F10.gz43_515319 | M00085419A:G09 | chiron(cc187- |
| | | | | ProstateCancer4 + 4) |
| 958 | 1292436 | 3617.H16.gz43_515417 | M00085435A:B11 | chiron(cc187- |
| | | | | ProstateCancer4 + 4) |
| 959 | 963880 | 3617.I01.gz43_515178 | M00085396B:G04 | chiron(cc187- |
| | | | | ProstateCancer4 + 4) |
| 960 | 1227972 | 3617.L16.gz43_515421 | M00085435B:C05 | chiron(cc187- |
| | | | | ProstateCancer4 + 4) |
| 961 | 875978 | 3617.L21.gz43_515501 | M00085446A:D04 | chiron(cc187- |
| | | | | ProstateCancer4 + 4) |
| 962 | 1064963 | 3617.M08.gz43_515294 | M00085415A:D12 | chiron(cc187- |
| | | | | ProstateCancer4 + 4) |
| 963 | 1224505 | 3617.M13.gz43_515374 | M00085428B:G02 | chiron(cc187- |
| | | | | ProstateCancer4 + 4) |
| 964 | 453901 | 3617.N05.gz43_515247 | M00085406A:F03 | chiron(cc187- |
| | | | | ProstateCancer4 + 4) |
| 965 | 1292423 | 3617.N10.gz43_515327 | M00085419C:H05 | chiron(cc187- |
| | | | | ProstateCancer4 + 4) |
| 966 | 1273844 | 3617.N14.gz43_515391 | M00085432A:H08 | chiron(cc187- |
| | | | | ProstateCancer4 + 4) |
| 967 | 1227623 | 3617.N19.gz43_515471 | M00085441D:H10 | chiron(cc187- |
| | | | | ProstateCancer4 + 4) |
| 968 | 1292262 | 3617.P11.gz43_515345 | M00085422D:D07 | chiron(cc187- |
| | | | | ProstateCancer4 + 4) |
| 969 | 852027 | 3617.P12.gz43_515361 | M00085427C:A04 | chiron(cc187- |
| | | | | ProstateCancer4 + 4) |
| 970 | 396320 | 3617.P13.gz43_515377 | M00085430C:E04 | chiron(cc187- |
| | | | | ProstateCancer4 + 4) |
| 971 | 1273844 | 3620.B03.gz43_515810 | M00085454A:G06 | chiron(cc187- |
| | | | | ProstateCancer4 + 4) |
| 972 | 386255 | 3620.B24.gz43_516146 | M00085449C:D04 | chiron(cc187- |
| | | | | ProstateCancer4 + 4) |
| 973 | 1061206 | 3620.E12.gz43_515957 | M00085471B:H09 | chiron(cc187- |
| | | | | ProstateCancer4 + 4) |
| 974 | 1227838 | 3620.E13.gz43_515973 | M00085473C:B02 | chiron(cc187- |
| | | | | ProstateCancer4 + 4) |
| 975 | 1138472 | 3620.E17.gz43_516037 | M00085503D:D05 | chiron(cc187- |
| | | | | ProstateCancer4 + 4) |
| 976 | 1292413 | 3620.E19.gz43_516069 | M00085510B:G12 | chiron(cc187- |
| | | | | ProstateCancer4 + 4) |
| 977 | 691512 | 3620.E23.gz43_516133 | M00085520C:D02 | chiron(cc187- |
| | | | | ProstateCancer4 + 4) |
| 978 | 503696 | 3620.E24.gz43_516149 | M00085449A:E02 | chiron(cc187- |
| | | | | ProstateCancer4 + 4) |
| 979 | 1082476 | 3620.G17.gz43_516039 | M00085503D:G05 | chiron(cc187- |
| | | | | ProstateCancer4 + 4) |
| 980 | 84466 | 3620.G23.gz43_516135 | M00085520D:B11 | chiron(cc187- |
| | | | | ProstateCancer4 + 4) |
| 981 | 1283437 | 3620.J18.gz43_516058 | M00085509A:A02 | chiron(cc187- |
| | | | | ProstateCancer4 + 4) |
| 982 | 855428 | 3620.K19.gz43_516075 | M00085510C:A07 | chiron(cc187- |
| | | | | ProstateCancer4 + 4) |
| 983 | 1076930 | 3620.K24.gz43_516155 | M00085449B:G12 | chiron(cc187- |
| | | | | ProstateCancer4 + 4) |
| 984 | 866421 | 3620.O23.gz43_516143 | M00085522C:E05 | chiron(cc187- |
| | | | | ProstateCancer4 + 4) |
| 985 | 1228147 | 3623.B07.gz43_516258 | M00085548C:D04 | chiron(cc187- |
| | | | | ProstateCancer4 + 4) |
| 986 | 376659 | 3623.E03.gz43_516197 | M00085533C:D11 | chiron(cc187- |
| | | | | ProstateCancer4 + 4) |
| 987 | 1136977 | 3623.E15.gz43_516389 | M00085569B:C09 | chiron(cc187- |
| | | | | ProstateCancer4 + 4) |
| 988 | 1228288 | 3623.F03.gz43_516198 | M00085534D:H09 | chiron(cc187- |
| | | | | ProstateCancer4 + 4) |
| 989 | 867297 | 3623.F20.gz43_516470 | M00085583A:E06 | chiron(cc187- |
| | | | | ProstateCancer4 + 4) |
| 990 | 1294229 | 3623.G14.gz43_516375 | M00085566A:D12 | chiron(cc187- |
| | | | | ProstateCancer4 + 4) |
| 991 | 99774 | 3623.H07.gz43_516264 | M00085548D:F01 | chiron(cc187- |
| | | | | ProstateCancer4 + 4) |
| 992 | 1258398 | 3623.H10.gz43_516312 | M00085555D:F08 | chiron(cc187- |
| | | | | ProstateCancer4 + 4) |
| 993 | 1253684 | 3623.H23.gz43_516520 | M00085590A:G06 | chiron(cc187- |
| | | | | ProstateCancer4 + 4) |
| 994 | 1250581 | 3623.I08.gz43_516281 | M00085549D:G03 | chiron(cc187- |
| | | | | ProstateCancer4 + 4) |
| 995 | 453582 | 3623.I11.gz43_516329 | M00085557B:B02 | chiron(cc187- |
| | | | | ProstateCancer4 + 4) |
| 996 | 1082338 | 3623.L05.gz43_516236 | M00085541C:F06 | chiron(cc187- |
| | | | | ProstateCancer4 + 4) |
| 997 | 738525 | 3623.L24.gz43_516540 | M00085528A:E02 | chiron(cc187- |
| | | | | ProstateCancer4 + 4) |
| 998 | 1106730 | 3623.M10.gz43_516317 | M00085555A:A06 | chiron(cc187- |
| | | | | ProstateCancer4 + 4) |
| 999 | 1088930 | 3623.N23.gz43_516526 | M00085590B:F11 | chiron(cc187- |
| | | | | ProstateCancer4 + 4) |
| 1000 | 1261580 | 3623.P22.gz43_516512 | M00085588B:G10 | chiron(cc187- |
| | | | | ProstateCancer4 + 4) |
| 1001 | 13541 | 3626.A10.gz43_516689 | M00085592A:G06 | chiron(cc187- |
| | | | | ProstateCancer4 + 4) |
| 1002 | 1227336 | 3626.C16.gz43_516787 | M00085597C:C03 | chiron(cc187- |
| | | | | ProstateCancer4 + 4) |
| 1003 | 513843 | 3626.E07.gz43_516645 | M00085600B:B03 | chiron(cc187- |
| | | | | ProstateCancer4 + 4) |
| 1004 | 959989 | 3626.F03.gz43_516582 | M00085603A:E01 | chiron(cc187- |
| | | | | ProstateCancer4 + 4) |
| 1005 | 1121157 | 3626.G01.gz43_516551 | M00085605A:D08 | chiron(cc187- |
| | | | | ProstateCancer4 + 4) |
| 1006 | 548277 | 3626.I20.gz43_516857 | M00085611B:D03 | chiron(cc187- |
| | | | | ProstateCancer4 + 4) |
| 1007 | 965633 | 3626.I23.gz43_516905 | M00085611C:D09 | chiron(cc187- |
| | | | | ProstateCancer4 + 4) |
| 1008 | 868581 | 3626.M13.gz43_516749 | M00085620B:D08 | chiron(cc187- |
| | | | | ProstateCancer4 + 4) |
| 1009 | 1070898 | 3626.M15.gz43_516781 | M00085620C:F05 | chiron(cc187- |
| | | | | ProstateCancer4 + 4) |
| 1010 | 1293972 | 3626.N07.gz43_516654 | M00085623B:G11 | chiron(cc187- |
| | | | | ProstateCancer4 + 4) |
| 1011 | 406291 | 3626.N24.gz43_516926 | M00085625B:F01 | chiron(cc187- |
| | | | | ProstateCancer4 + 4) |
| 1012 | 1224492 | 3626.O08.gz43_516671 | M00085626B:B11 | chiron(cc187- |
| | | | | ProstateCancer4 + 4) |
| 1013 | 372868 | 3626.P11.gz43_516720 | M00085628B:D03 | chiron(cc187- |
| | | | | ProstateCancer4 + 4) |
| 1014 | 1227781 | 3626.P14.gz43_516768 | M00085628C:D08 | chiron(cc187- |
| | | | | ProstateCancer4 + 4) |
| 1015 | 15577 | 3629.A16.gz43_517169 | M00085630B:B09 | chiron(cc187- |
| | | | | ProstateCancer4 + 4) |
| 1016 | 1292413 | 3629.B14.gz43_517138 | M00085632C:A06 | chiron(cc187- |
| | | | | ProstateCancer4 + 4) |
| 1017 | 1257583 | 3629.C14.gz43_517139 | M00085635C:H07 | chiron(cc187- |
| | | | | ProstateCancer4 + 4) |
| 1018 | 1292996 | 3629.E01.gz43_516933 | M00085640A:H11 | chiron(cc187- |
| | | | | ProstateCancer4 + 4) |
| 1019 | 1202570 | 3629.E20.gz43_517237 | M00085641C:G01 | chiron(cc187- |
| | | | | ProstateCancer4 + 4) |
| 1020 | 1259955 | 3629.F24.gz43_517302 | M00085643D:F06 | chiron(cc187- |
| | | | | ProstateCancer4 + 4) |
| 1021 | 517444 | 3629.H10.gz43_517080 | M00085647A:C08 | chiron(cc187- |
| | | | | ProstateCancer4 + 4) |
| 1022 | 599820 | 3629.H12.gz43_517112 | M00085647A:E04 | chiron(cc187- |
| | | | | ProstateCancer4 + 4) |
| 1023 | 1226229 | 3629.I11.gz43_517097 | M00085649B:A03 | chiron(cc187- |
| | | | | ProstateCancer4 + 4) |
| 1024 | 1226413 | 3629.I16.gz43_517177 | M00085649C:A12 | chiron(cc187- |
| | | | | ProstateCancer4 + 4) |
| 1025 | 1292423 | 3629.J03.gz43_516970 | M00085650D:E12 | chiron(cc187- |
| | | | | ProstateCancer4 + 4) |
| 1026 | 1106730 | 3629.J07.gz43_517034 | M00085651A:A01 | chiron(cc187- |
| | | | | ProstateCancer4 + 4) |
| 1027 | 966355 | 3632.C11.gz43_517475 | M00085676C:C04 | chiron(cc187- |
| | | | | ProstateCancer4 + 4) |
| 1028 | 28706 | 3632.C17.gz43_517571 | M00085677A:E02 | chiron(cc187- |
| | | | | ProstateCancer4 + 4) |
| 1029 | 402588 | 3632.F07.gz43_517414 | M00085683B:B10 | chiron(cc187- |
| | | | | ProstateCancer4 + 4) |
| 1030 | 1055326 | 3632.G01.gz43_517319 | M00085686A:C05 | chiron(cc187- |
| | | | | ProstateCancer4 + 4) |
| 1031 | 16472 | 3632.I20.gz43_517625 | M00085691A:E06 | chiron(cc187- |
| | | | | ProstateCancer4 + 4) |
| 1032 | 1082360 | 3632.K20.gz43_517627 | M00085694D:D06 | chiron(cc187- |
| | | | | ProstateCancer4 + 4) |
| 1033 | 1258491 | 3632.M08.gz43_517437 | M00085697A:F01 | chiron(cc187- |
| | | | | ProstateCancer4 + 4) |
| 1034 | 452564 | 3632.M13.gz43_517517 | M00085697B:G05 | chiron(cc187- |
| | | | | ProstateCancer4 + 4) |
| 1035 | 854573 | 3632.M19.gz43_517613 | M00085697D:H11 | chiron(cc187- |
| | | | | ProstateCancer4 + 4) |
| 1036 | 1292996 | 3632.N13.gz43_517518 | M00085701A:A09 | chiron(cc187- |
| | | | | ProstateCancer4 + 4) |
| 1037 | 1055256 | 3632.N21.gz43_517646 | M00085701D:A02 | chiron(cc187- |
| | | | | ProstateCancer4 + 4) |
| 1038 | 18225 | 3632.O06.gz43_517407 | M00085702B:G11 | chiron(cc187- |
| | | | | ProstateCancer4 + 4) |
| 1039 | 1053854 | 3632.P07.gz43_517424 | M00085705A:E01 | chiron(cc187- |
| | | | | ProstateCancer4 + 4) |
| 1040 | 1292582 | 3635.A06.gz43_517777 | M00085707A:A04 | chiron(cc187- |
| | | | | ProstateCancer4 + 4) |
| 1041 | 486961 | 3635.A08.gz43_517809 | M00085707A:F01 | chiron(cc187- |
| | | | | ProstateCancer4 + 4) |
| 1042 | 1171582 | 3635.A13.gz43_517889 | M00085707C:A10 | chiron(cc187- |
| | | | | ProstateCancer4 + 4) |
| 1043 | 652651 | 3635.D07.gz43_517796 | M00085714C:G03 | chiron(cc187- |
| | | | | ProstateCancer4 + 4) |
| 1044 | 1252170 | 3635.F01.gz43_517702 | M00085720D:A03 | chiron(cc187- |
| | | | | ProstateCancer4 + 4) |
| 1045 | 761460 | 3635.F06.gz43_517782 | M00085721A:G03 | chiron(cc187- |
| | | | | ProstateCancer4 + 4) |
| 1046 | 1082195 | 3635.F10.gz43_517846 | M00085722A:A06 | chiron(cc187- |
| | | | | ProstateCancer4 + 4) |
| 1047 | 523931 | 3635.H20.gz43_518008 | M00085728B:C08 | chiron(cc187- |
| | | | | ProstateCancer4 + 4) |
| 1048 | 731936 | 3635.J06.gz43_517786 | M00085732A:B09 | chiron(cc187- |
| | | | | ProstateCancer4 + 4) |
| 1049 | 1227838 | 3635.J09.gz43_517834 | M00085732A:G04 | chiron(cc187- |
| | | | | ProstateCancer4 + 4) |
| 1050 | 1258456 | 3635.K05.gz43_517771 | M00085733D:E05 | chiron(cc187- |
| | | | | ProstateCancer4 + 4) |
| 1051 | 1209252 | 3635.K06.gz43_517787 | M00085733D:F08 | chiron(cc187- |
| | | | | ProstateCancer4 + 4) |
| 1052 | 484459 | 3635.M18.gz43_517981 | M00085741C:D06 | chiron(cc187- |
| | | | | ProstateCancer4 + 4) |
| 1053 | 1053514 | 3635.O01.gz43_517711 | M00085745C:C03 | chiron(cc187- |
| | | | | ProstateCancer4 + 4) |
| 1054 | 458490 | 3635.O14.gz43_517919 | M00085747A:B11 | chiron(cc187- |
| | | | | ProstateCancer4 + 4) |
| 1055 | 1258620 | 3635.P17.gz43_517968 | M00085750A:G03 | chiron(cc187- |
| | | | | ProstateCancer4 + 4) |
| 1056 | 733840 | 3635.P18.gz43_517984 | M00085750B:C10 | chiron(cc187- |
| | | | | ProstateCancer4 + 4) |
| 1057 | 549024 | 3638.A02.gz43_518097 | M00085754C:A12 | chiron(cc187- |
| | | | | ProstateCancer4 + 4) |
| 1058 | 1248861 | 3638.A24.gz43_518449 | M00085751A:A11 | chiron(cc187- |
| | | | | ProstateCancer4 + 4) |
| 1059 | 1088847 | 3638.F15.gz43_518310 | M00085786D:G12 | chiron(cc187- |
| | | | | ProstateCancer4 + 4) |
| 1060 | 846056 | 3638.H07.gz43_518184 | M00085764B:H12 | chiron(cc187- |
| | | | | ProstateCancer4 + 4) |
| 1061 | 731936 | 3638.J09.gz43_518218 | M00085770C:A12 | chiron(cc187- |
| | | | | ProstateCancer4 + 4) |
| 1062 | 858745 | 3638.K06.gz43_518171 | M00085761C:E07 | chiron(cc187- |
| | | | | ProstateCancer4 + 4) |
| 1063 | 400760 | 3638.L10.gz43_518236 | M00085773A:F05 | chiron(cc187- |
| | | | | ProstateCancer4 + 4) |
| 1064 | 1292600 | 3638.N05.gz43_518158 | M00085761A:B03 | chiron(cc187- |
| | | | | ProstateCancer4 + 4) |
| 1065 | 557994 | 3643.D21.gz43_518788 | M00085882B:F11 | chiron(cc187- |
| | | | | ProstateCancer4 + 4) |
| 1066 | 1225500 | 3643.E24.gz43_518837 | M00085886C:F05 | chiron(cc187- |
| | | | | ProstateCancer4 + 4) |
| 1067 | 684638 | 3643.F07.gz43_518566 | M00085887C:B03 | chiron(cc187- |
| | | | | ProstateCancer4 + 4) |
| 1068 | 1230257 | 3643.G20.gz43_518775 | M00085891D:E07 | chiron(cc187- |
| | | | | ProstateCancer4 + 4) |
| 1069 | 448356 | 3643.G24.gz43_518839 | M00085892A:F04 | chiron(cc187- |
| | | | | ProstateCancer4 + 4) |
| 1070 | 18376 | 3643.H09.gz43_518600 | M00085893B:D08 | chiron(cc187- |
| | | | | ProstateCancer4 + 4) |
| 1071 | 676129 | 3643.I01.gz43_518473 | M00085896D:A11 | chiron(cc187- |
| | | | | ProstateCancer4 + 4) |
| 1072 | 44071 | 3643.I02.gz43_518489 | M00085896D:A09 | chiron(cc187- |
| | | | | ProstateCancer4 + 4) |
| 1073 | 1224505 | 3643.I18.gz43_518745 | M00085899C:G10 | chiron(cc187- |
| | | | | ProstateCancer4 + 4) |
| 1074 | 1292436 | 3643.I24.gz43_518841 | M00085900B:E02 | chiron(cc187- |
| | | | | ProstateCancer4 + 4) |
| 1075 | 1293040 | 3643.K06.gz43_518555 | M00085904D:D02 | chiron(cc187- |
| | | | | ProstateCancer4 + 4) |
| 1076 | 1271515 | 3643.L01.gz43_518476 | M00085907B:B11 | chiron(cc187- |
| | | | | ProstateCancer4 + 4) |
| 1077 | 683650 | 3643.N24.gz43_518846 | M00085917C:A04 | chiron(cc187- |
| | | | | ProstateCancer4 + 4) |
| 1078 | 684462 | 3643.O16.gz43_518719 | M00085918D:C11 | chiron(cc187- |
| | | | | ProstateCancer4 + 4) |
| 1079 | 5375 | 3643.O18.gz43_518751 | M00085919A:A05 | chiron(cc187- |
| | | | | ProstateCancer4 + 4) |
| 1080 | 1294075 | 3643.O21.gz43_518799 | M00085919B:F02 | chiron(cc187- |
| | | | | ProstateCancer4 + 4) |
| 1081 | 1271515 | 3643.P13.gz43_518672 | M00085922A:A08 | chiron(cc187- |
| | | | | ProstateCancer4 + 4) |
| 1082 | 558076 | 3643.P14.gz43_518688 | M00085922A:E10 | chiron(cc187- |
| | | | | ProstateCancer4 + 4) |
| 1083 | 1251950 | 3646.A07.gz43_518945 | M00085926C:C06 | chiron(cc187- |
| | | | | ProstateCancer4 + 4) |
| 1084 | 453767 | 3646.A09.gz43_518977 | M00085927A:F06 | chiron(cc187- |
| | | | | ProstateCancer4 + 4) |
| 1085 | 13541 | 3646.A12.gz43_519025 | M00085927C:G10 | chiron(cc187- |
| | | | | ProstateCancer4 + 4) |
| 1086 | 1230257 | 3646.A13.gz43_519041 | M00085927C:G11 | chiron(cc187- |
| | | | | ProstateCancer4 + 4) |
| 1087 | 1079196 | 3646.B20.gz43_519154 | M00085933B:B06 | chiron(cc187- |
| | | | | ProstateCancer4 + 4) |
| 1088 | 1061206 | 3646.C06.gz43_518931 | M00085934B:E12 | chiron(cc187- |
| | | | | ProstateCancer4 + 4) |
| 1089 | 726922 | 3646.C16.gz43_519091 | M00085935D:H04 | chiron(cc187- |
| | | | | ProstateCancer4 + 4) |
| 1090 | 508322 | 3646.E02.gz43_518869 | M00085941B:A06 | chiron(cc187- |
| | | | | ProstateCancer4 + 4) |
| 1091 | 167565 | 3646.E20.gz43_519157 | M00085944A:F04 | chiron(cc187- |
| | | | | ProstateCancer4 + 4) |
| 1092 | 1226588 | 3646.H04.gz43_518904 | M00085955C:C03 | chiron(cc187- |
| | | | | ProstateCancer4 + 4) |
| 1093 | 402424 | 3646.H09.gz43_518984 | M00085955D:H10 | chiron(cc187- |
| | | | | ProstateCancer4 + 4) |
| 1094 | 1182447 | 3646.H16.gz43_519096 | M00085956B:E08 | chiron(cc187- |
| | | | | ProstateCancer4 + 4) |
| 1095 | 1136803 | 3646.I01.gz43_518857 | M00085956D:G04 | chiron(cc187- |
| | | | | ProstateCancer4 + 4) |
| 1096 | 500798 | 3646.J03.gz43_518890 | M00085959B:D04 | chiron(cc187- |
| | | | | ProstateCancer4 + 4) |
| 1097 | 727449 | 3646.J22.gz43_519194 | M00085962B:A12 | chiron(cc187- |
| | | | | ProstateCancer4 + 4) |
| 1098 | 1292289 | 3646.K14.gz43_519067 | M00085964A:B11 | chiron(cc187- |
| | | | | ProstateCancer4 + 4) |
| 1099 | 1293972 | 3646.L17.gz43_519116 | M00085968B:F09 | chiron(cc187- |
| | | | | ProstateCancer4 + 4) |
| 1100 | 848701 | 3646.O13.gz43_519055 | M00085980A:G10 | chiron(cc187- |
| | | | | ProstateCancer4 + 4) |
| 1101 | 5375 | 3646.O16.gz43_519103 | M00085980B:F06 | chiron(cc187- |
| | | | | ProstateCancer4 + 4) |
| 1102 | 862845 | 3646.P09.gz43_518992 | M00085982D:C06 | chiron(cc187- |
| | | | | ProstateCancer4 + 4) |
| 1103 | 738525 | 3646.P14.gz43_519072 | M00085985C:D02 | chiron(cc187- |
| | | | | ProstateCancer4 + 4) |
| 1104 | 968647 | 3646.P17.gz43_519120 | M00085986B:H02 | chiron(cc187- |
| | | | | ProstateCancer4 + 4) |
| 1105 | 1292389 | 3661.A08.gz43_519483 | M00085988D:F09 | chiron(cc187- |
| | | | | ProstateCancer4 + 4) |
| 1106 | 1105945 | 3661.D17.gz43_519630 | M00086000A:C05 | chiron(cc187- |
| | | | | ProstateCancer4 + 4) |
| 1107 | 1257477 | 3661.D18.gz43_519646 | M00086000C:B08 | chiron(cc187- |
| | | | | ProstateCancer4 + 4) |
| 1108 | 1247030 | 3661.E19.gz43_519663 | M00086003D:B10 | chiron(cc187- |
| | | | | ProstateCancer4 + 4) |
| 1109 | 189355 | 3661.E23.gz43_519727 | M00086003D:G08 | chiron(cc187- |
| | | | | ProstateCancer4 + 4) |
| 1110 | 1129928 | 3661.F14.gz43_519584 | M00086005A:B02 | chiron(cc187- |
| | | | | ProstateCancer4 + 4) |
| 1111 | 1224881 | 3661.G16.gz43_519617 | M00086008D:F08 | chiron(cc187- |
| | | | | ProstateCancer4 + 4) |
| 1112 | 504038 | 3661.G20.gz43_519681 | M00086010B:B05 | chiron(cc187- |
| | | | | ProstateCancer4 + 4) |
| 1113 | 558081 | 3661.H11.gz43_519538 | M00086015A:B03 | chiron(cc187- |
| | | | | ProstateCancer4 + 4) |
| 1114 | 609914 | 3661.H24.gz43_519746 | M00086015D:G04 | chiron(cc187- |
| | | | | ProstateCancer4 + 4) |
| 1115 | 1292600 | 3661.I22.gz43_519715 | M00086018A:A05 | chiron(cc187- |
| | | | | ProstateCancer4 + 4) |
| 1116 | 1088847 | 3661.J15.gz43_519604 | M00086020C:E09 | chiron(cc187- |
| | | | | ProstateCancer4 + 4) |
| 1117 | 1292262 | 3661.K22.gz43_519717 | M00086027A:G04 | chiron(cc187- |
| | | | | ProstateCancer4 + 4) |
| 1118 | 19161 | 3661.L19.gz43_519670 | M00086031C:G11 | chiron(cc187- |
| | | | | ProstateCancer4 + 4) |
| 1119 | 380634 | 3661.M03.gz43_519415 | M00086035A:C11 | chiron(cc187- |
| | | | | ProstateCancer4 + 4) |
| 1120 | 1056246 | 3661.M23.gz43_519735 | M00086038A:D03 | chiron(cc187- |
| | | | | ProstateCancer4 + 4) |
| 1121 | 678054 | 3661.P22.gz43_519722 | M00086048D:H08 | chiron(cc187- |
| | | | | ProstateCancer4 + 4) |
| 1122 | 691512 | 3662.A13.gz43_519947 | M00086053B:F01 | chiron(cc187- |
| | | | | ProstateCancer4 + 4) |
| 1123 | 841016 | 3662.B13.gz43_519948 | M00086057A:F07 | chiron(cc187- |
| | | | | ProstateCancer4 + 4) |
| 1124 | 496233 | 3662.C10.gz43_519901 | M00086060C:F04 | chiron(cc187- |
| | | | | ProstateCancer4 + 4) |
| 1125 | 484459 | 3662.C15.gz43_519981 | M00086061B:E02 | chiron(cc187- |
| | | | | ProstateCancer4 + 4) |
| 1126 | 448177 | 3662.F13.gz43_519952 | M00086076B:D02 | chiron(cc187- |
| | | | | ProstateCancer4 + 4) |
| 1127 | 455461 | 3662.H14.gz43_519970 | M00086081B:A06 | chiron(cc187- |
| | | | | ProstateCancer4 + 4) |
| 1128 | 1253902 | 3662.H23.gz43_520114 | M00086081D:D09 | chiron(cc187- |
| | | | | ProstateCancer4 + 4) |
| 1129 | 517014 | 3662.H24.gz43_520130 | M00086081D:H11 | chiron(cc187- |
| | | | | ProstateCancer4 + 4) |
| 1130 | 1250660 | 3662.J05.gz43_519828 | M00086084D:E12 | chiron(cc187- |
| | | | | ProstateCancer4 + 4) |
| 1131 | 733840 | 3662.J08.gz43_519876 | M00086085A:G05 | chiron(cc187- |
| | | | | ProstateCancer4 + 4) |
| 1132 | 99774 | 3662.J09.gz43_519892 | M00086085A:H03 | chiron(cc187- |
| | | | | ProstateCancer4 + 4) |
| 1133 | 1253234 | 3662.J16.gz43_520004 | M00086085D:F09 | chiron(cc187- |
| | | | | ProstateCancer4 + 4) |
| 1134 | 517444 | 3662.K03.gz43_519797 | M00086087C:D04 | chiron(cc187- |
| | | | | ProstateCancer4 + 4) |
| 1135 | 1131409 | 3662.L05.gz43_519830 | M00086090B:B09 | chiron(cc187- |
| | | | | ProstateCancer4 + 4) |
| 1136 | 1082403 | 3662.N24.gz43_520136 | M00086097C:B10 | chiron(cc187- |
| | | | | ProstateCancer4 + 4) |
| 1137 | 1112545 | 3662.O02.gz43_519785 | M00086097D:D12 | chiron(cc187- |
| | | | | ProstateCancer4 + 4) |
| 1138 | 1240756 | 3662.P03.gz43_519802 | M00086103D:E08 | chiron(cc187- |
| | | | | ProstateCancer4 + 4) |
| 1139 | 1257531 | 3663.A09.gz43_520267 | M00086106D:H01 | chiron(cc187- |
| | | | | ProstateCancer4 + 4) |
| 1140 | 1052394 | 3663.C08.gz43_520253 | M00086112C:A01 | chiron(cc187- |
| | | | | ProstateCancer4 + 4) |
| 1141 | 1250373 | 3663.C19.gz43_520429 | M00086114D:G11 | chiron(cc187- |
| | | | | ProstateCancer4 + 4) |
| 1142 | 1245188 | 3663.E04.gz43_520191 | M00086120A:D11 | chiron(cc187- |
| | | | | ProstateCancer4 + 4) |
| 1143 | 845931 | 3663.F15.gz43_520368 | M00086126C:D09 | chiron(cc187- |
| | | | | ProstateCancer4 + 4) |
| 1144 | 742875 | 3663.F22.gz43_520480 | M00086127C:C05 | chiron(cc187- |
| | | | | ProstateCancer4 + 4) |
| 1145 | 540730 | 3663.G01.gz43_520145 | M00086128A:D09 | chiron(cc187- |
| | | | | ProstateCancer4 + 4) |
| 1146 | 1261035 | 3663.G08.gz43_520257 | M00086128D:H10 | chiron(cc187- |
| | | | | ProstateCancer4 + 4) |
| 1147 | 452330 | 3663.H20.gz43_520450 | M00086136C:B06 | chiron(cc187- |
| | | | | ProstateCancer4 + 4) |
| 1148 | 552142 | 3663.J06.gz43_520228 | M00086143B:B08 | chiron(cc187- |
| | | | | ProstateCancer4 + 4) |
| 1149 | 1137259 | 3663.J16.gz43_520388 | M00086145A:F07 | chiron(cc187- |
| | | | | ProstateCancer4 + 4) |
| 1150 | 1227497 | 3663.K02.gz43_520165 | M00086146D:A09 | chiron(cc187- |
| | | | | ProstateCancer4 + 4) |
| 1151 | 439297 | 3663.K13.gz43_520341 | M00086149A:F06 | chiron(cc187- |
| | | | | ProstateCancer4 + 4) |
| 1152 | 760580 | 3663.L18.gz43_520422 | M00086155A:G12 | chiron(cc187- |
| | | | | ProstateCancer4 + 4) |
| 1153 | 1224492 | 3663.L24.gz43_520518 | M00086155D:E12 | chiron(cc187- |
| | | | | ProstateCancer4 + 4) |
| 1154 | 1292932 | 3663.M24.gz43_520519 | M00086157D:D03 | chiron(cc187- |
| | | | | ProstateCancer4 + 4) |
| 1155 | 1053514 | 3663.N09.gz43_520280 | M00086159A:F03 | chiron(cc187- |
| | | | | ProstateCancer4 + 4) |
| 1156 | 1055256 | 3663.N10.gz43_520296 | M00086159A:F05 | chiron(cc187- |
| | | | | ProstateCancer4 + 4) |
| 1157 | 189355 | 3663.N12.gz43_520328 | M00086159B:E04 | chiron(cc187- |
| | | | | ProstateCancer4 + 4) |
| 1158 | 644174 | 3663.N16.gz43_520392 | M00086159D:D01 | chiron(cc187- |
| | | | | ProstateCancer4 + 4) |
| 1159 | 727764 | 3663.O07.gz43_520249 | M00086160D:F08 | chiron(cc187- |
| | | | | ProstateCancer4 + 4) |
| 1160 | 1255455 | 3663.O09.gz43_520281 | M00086161B:H08 | chiron(cc187- |
| | | | | ProstateCancer4 + 4) |
| 1161 | 1292996 | 3664.A11.gz43_520683 | M00086166D:H04 | chiron(cc187- |
| | | | | ProstateCancer4 + 4) |
| 1162 | 727730 | 3664.C21.gz43_520845 | M00086175C:D06 | chiron(cc187- |
| | | | | ProstateCancer4 + 4) |
| 1163 | 189355 | 3664.D06.gz43_520606 | M00086176C:A06 | chiron(cc187- |
| | | | | ProstateCancer4 + 4) |
| 1164 | 965947 | 3664.D12.gz43_520702 | M00086178A:D07 | chiron(cc187- |
| | | | | ProstateCancer4 + 4) |
| 1165 | 1261035 | 3664.D17.gz43_520782 | M00086178D:H12 | chiron(cc187- |
| | | | | ProstateCancer4 + 4) |
| 1166 | 761460 | 3664.E18.gz43_520799 | M00086183A:H04 | chiron(cc187- |
| | | | | ProstateCancer4 + 4) |
| 1167 | 504904 | 3664.E23.gz43_520879 | M00086184C:C10 | chiron(cc187- |
| | | | | ProstateCancer4 + 4) |
| 1168 | 1227968 | 3664.E24.gz43_520895 | M00086184C:D04 | chiron(cc187- |
| | | | | ProstateCancer4 + 4) |
| 1169 | 606040 | 3664.G12.gz43_520705 | M00086191A:G09 | chiron(cc187- |
| | | | | ProstateCancer4 + 4) |
| 1170 | 1292932 | 3664.G20.gz43_520833 | M00086193A:F04 | chiron(cc187- |
| | | | | ProstateCancer4 + 4) |
| 1171 | 1069578 | 3664.H15.gz43_520754 | M00086196A:F07 | chiron(cc187- |
| | | | | ProstateCancer4 + 4) |
| 1172 | 1292439 | 3664.H22.gz43_520866 | M00086197B:A03 | chiron(cc187- |
| | | | | ProstateCancer4 + 4) |
| 1173 | 652651 | 3664.J12.gz43_520708 | M00086202C:A07 | chiron(cc187- |
| | | | | ProstateCancer4 + 4) |
| 1174 | 449276 | 3664.J23.gz43_520884 | M00086203C:H04 | chiron(cc187- |
| | | | | ProstateCancer4 + 4) |
| 1175 | 548217 | 3664.K16.gz43_520773 | M00086206A:E10 | chiron(cc187- |
| | | | | ProstateCancer4 + 4) |
| 1176 | 1055326 | 3664.K19.gz43_520821 | M00086206C:C01 | chiron(cc187- |
| | | | | ProstateCancer4 + 4) |
| 1177 | 1293946 | 3664.L21.gz43_520854 | M00086209B:H12 | chiron(cc187- |
| | | | | ProstateCancer4 + 4) |
| 1178 | 1256564 | 3664.O22.gz43_520873 | M00086225B:E01 | chiron(cc187- |
| | | | | ProstateCancer4 + 4) |
| 1179 | 963880 | 3664.P12.gz43_520714 | M00086227B:E06 | chiron(cc187- |
| | | | | ProstateCancer4 + 4) |
| 1180 | 8045 | 3664.P18.gz43_520810 | M00086228A:F11 | chiron(cc187- |
| | | | | ProstateCancer4 + 4) |
| 1181 | 609914 | 3665.A23.gz43_521259 | M00086233C:F01 | chiron(cc187- |
| | | | | ProstateCancer4 + 4) |
| 1182 | 853696 | 3665.B01.gz43_520908 | M00086233D:A03 | chiron(cc187- |
| | | | | ProstateCancer4 + 4) |
| 1183 | 418439 | 3665.B12.gz43_521084 | M00086235A:F05 | chiron(cc187- |
| | | | | ProstateCancer4 + 4) |
| 1184 | 840852 | 3665.E11.gz43_521071 | M00086247A:G11 | chiron(cc187- |
| | | | | ProstateCancer4 + 4) |
| 1185 | 555115 | 3665.E20.gz43_521215 | M00086248A:H09 | chiron(cc187- |
| | | | | ProstateCancer4 + 4) |
| 1186 | 1061206 | 3665.H20.gz43_521218 | M00086259A:F11 | chiron(cc187- |
| | | | | ProstateCancer4 + 4) |
| 1187 | 733840 | 3665.K01.gz43_520917 | M00086266B:E10 | chiron(cc187- |
| | | | | ProstateCancer4 + 4) |
| 1188 | 732183 | 3665.M01.gz43_520919 | M00086270C:D08 | chiron(cc187- |
| | | | | ProstateCancer4 + 4) |
| 1189 | 1292281 | 3665.M21.gz43_521239 | M00086272D:E04 | chiron(cc187- |
| | | | | ProstateCancer4 + 4) |
| 1190 | 1227352 | 3665.M23.gz43_521271 | M00086272D:H11 | chiron(cc187- |
| | | | | ProstateCancer4 + 4) |
| 1191 | 958844 | 3665.N24.gz43_521288 | M00086276D:F10 | chiron(cc187- |
| | | | | ProstateCancer4 + 4) |
| 1192 | 46 | 3665.O06.gz43_521001 | M00086277B:E06 | chiron(cc187- |
| | | | | ProstateCancer4 + 4) |
| 1193 | 1138627 | 3665.O14.gz43_521129 | M00086279A:B07 | chiron(cc187- |
| | | | | ProstateCancer4 + 4) |
| 1194 | 1224389 | 3665.O15.gz43_521145 | M00086279C:A08 | chiron(cc187- |
| | | | | ProstateCancer4 + 4) |
| 1195 | 672192 | 3665.O19.gz43_521209 | M00086279D:C07 | chiron(cc187- |
| | | | | ProstateCancer4 + 4) |
| 1196 | 724897 | 3665.O21.gz43_521241 | M00086280A:E02 | chiron(cc187- |
| | | | | ProstateCancer4 + 4) |
| 1197 | 1292389 | 3665.O23.gz43_521273 | M00086280B:G09 | chiron(cc187- |
| | | | | ProstateCancer4 + 4) |
| 1198 | 1274736 | 3665.P13.gz43_521114 | M00086282A:B10 | chiron(cc187- |
| | | | | ProstateCancer4 + 4) |
| 1199 | 1292582 | 3666.A07.gz43_521387 | M00086285B:C10 | chiron(cc187- |
| | | | | ProstateCancer4 + 4) |
| 1200 | 99774 | 3666.A19.gz43_521579 | M00086286B:F08 | chiron(cc187- |
| | | | | ProstateCancer4 + 4) |
| 1201 | 742101 | 3666.A24.gz43_521659 | M00086286C:H02 | chiron(cc187- |
| | | | | ProstateCancer4 + 4) |
| 1202 | 766134 | 3666.B11.gz43_521452 | M00086288A:B05 | chiron(cc187- |
| | | | | ProstateCancer4 + 4) |
| 1203 | 1250373 | 3666.C18.gz43_521565 | M00086291A:E10 | chiron(cc187- |
| | | | | ProstateCancer4 + 4) |
| 1204 | 1088847 | 3666.D02.gz43_521310 | M00086291D:B08 | chiron(cc187- |
| | | | | ProstateCancer4 + 4) |
| 1205 | 1293946 | 3666.D11.gz43_521454 | M00086294B:E11 | chiron(cc187- |
| | | | | ProstateCancer4 + 4) |
| 1206 | 3462 | 3666.D15.gz43_521518 | M00086294C:G05 | chiron(cc187- |
| | | | | ProstateCancer4 + 4) |
| 1207 | 727764 | 3666.D16.gz43_521534 | M00086294D:F08 | chiron(cc187- |
| | | | | ProstateCancer4 + 4) |
| 1208 | 396724 | 3666.F22.gz43_521632 | M00086301A:D04 | chiron(cc187- |
| | | | | ProstateCancer4 + 4) |
| 1209 | 1142019 | 3666.G12.gz43_521473 | M00086302A:E06 | chiron(cc187- |
| | | | | ProstateCancer4 + 4) |
| 1210 | 765500 | 3666.I12.gz43_521475 | M00086310A:F04 | chiron(cc187- |
| | | | | ProstateCancer4 + 4) |
| 1211 | 1197259 | 3666.L01.gz43_521302 | M00086322A:E02 | chiron(cc187- |
| | | | | ProstateCancer4 + 4) |
| 1212 | 1138472 | 3666.L06.gz43_521382 | M00086322D:D05 | chiron(cc187- |
| | | | | ProstateCancer4 + 4) |
| 1213 | 869453 | 3666.L11.gz43_521462 | M00086323B:C04 | chiron(cc187- |
| | | | | ProstateCancer4 + 4) |
| 1214 | 1088251 | 3666.L23.gz43_521654 | M00086324D:D01 | chiron(cc187- |
| | | | | ProstateCancer4 + 4) |
| 1215 | 1292413 | 3666.M16.gz43_521543 | M00086327B:D10 | chiron(cc187- |
| | | | | ProstateCancer4 + 4) |
| 1216 | 1274736 | 3666.N06.gz43_521384 | M00086328B:G12 | chiron(cc187- |
| | | | | ProstateCancer4 + 4) |
| 1217 | 1259955 | 3667.A15.gz43_524557 | M00086336B:A08 | chiron(cc187- |
| | | | | ProstateCancer4 + 4) |
| 1218 | 8045 | 3754.A08.gz43_532949 | M00083799D:F10 | chiron(cc187-NormBPHProstate) |
| 1219 | 1227999 | 3754.A13.gz43_533029 | M00083800C:E07 | chiron(cc187-NormBPHProstate) |
| 1220 | 637915 | 3754.A16.gz43_533077 | M00083801B:H03 | chiron(cc187-NormBPHProstate) |
| 1221 | 764978 | 3754.B04.gz43_532886 | M00083803B:F11 | chiron(cc187-NormBPHProstate) |
| 1222 | 500919 | 3754.805.gz43_532902 | M00083803B:F12 | chiron(cc187-NormBPHProstate) |
| 1223 | 1224133 | 3754.B07.gz43_532934 | M00083803C:F03 | chiron(cc187-NormBPHProstate) |
| 1224 | 831638 | 3754.B08.gz43_532950 | M00083804A:H12 | chiron(cc187-NormBPHProstate) |
| 1225 | 1229792 | 3754.B10.gz43_532982 | M00083804B:C03 | chiron(cc187-NormBPHProstate) |
| 1226 | 1223618 | 3754.C22.gz43_533175 | M00083809B:E08 | chiron(cc187-NormBPHProstate) |
| 1227 | 453767 | 3754.D19.gz43_533128 | M00083812C:G02 | chiron(cc187-NormBPHProstate) |
| 1228 | 733538 | 3754.E12.gz43_533017 | M00083814D:A10 | chiron(cc187-NormBPHProstate) |
| 1229 | 401424 | 3754.E20.gz43_533145 | M00083815C:H08 | chiron(cc187-NormBPHProstate) |
| 1230 | 1081049 | 3754.F01.gz43_532842 | M00083816B:D08 | chiron(cc187-NormBPHProstate) |
| 1231 | 1193124 | 3754.F08.gz43_532954 | M00083817B:A11 | chiron(cc187-NormBPHProstate) |
| 1232 | 1085638 | 3754.F11.gz43_533002 | M00083817B:G09 | chiron(cc187-NormBPHProstate) |
| 1233 | 427093 | 3754.F15.gz43_533066 | M00083817D:A08 | chiron(cc187-NormBPHProstate) |
| 1234 | 514090 | 3754.F20.gz43_533146 | M00083818A:E09 | chiron(cc187-NormBPHProstate) |
| 1235 | 1080401 | 3754.G03.gz43_532875 | M00083818C:A02 | chiron(cc187-NormBPHProstate) |
| 1236 | 567700 | 3754.G08.gz43_532955 | M00083819B:E10 | chiron(cc187-NormBPHProstate) |
| 1237 | 828695 | 3754.G18.gz43_533115 | M00083820B:C03 | chiron(cc187-NormBPHProstate) |
| 1238 | 717583 | 3754.H08.gz43_532956 | M00083831D:H11 | chiron(cc187-NormBPHProstate) |
| 1239 | 454214 | 3754.I01.gz43_532845 | M00083834B:F09 | chiron(cc187-NormBPHProstate) |
| 1240 | 169762 | 3754.I03.gz43_532877 | M00083834C:E02 | chiron(cc187-NormBPHProstate) |
| 1241 | 1227912 | 3754.J01.gz43_532846 | M00083838A:E05 | chiron(cc187-NormBPHProstate) |
| 1242 | 1218793 | 3754.J05.gz43_532910 | M00083838C:F07 | chiron(cc187-NormBPHProstate) |
| 1243 | 855095 | 3754.J10.gz43_532990 | M00083839A:H03 | chiron(cc187-NormBPHProstate) |
| 1244 | 1176992 | 3754.J12.gz43_533022 | M00083839B:G09 | chiron(cc187-NormBPHProstate) |
| 1245 | 1073767 | 3754.J24.gz43_533214 | M00083841A:G01 | chiron(cc187-NormBPHProstate) |
| 1246 | 452015 | 3754.K14.gz43_533055 | M00083844A:E12 | chiron(cc187-NormBPHProstate) |
| 1247 | 1224454 | 3754.K17.gz43_533103 | M00083844B:C04 | chiron(cc187-NormBPHProstate) |
| 1248 | 961757 | 3754.K20.gz43_533151 | M00083844C:C04 | chiron(cc187-NormBPHProstate) |
| 1249 | 403738 | 3754.M08.gz43_532961 | M00083849C:F11 | chiron(cc187-NormBPHProstate) |
| 1250 | 455386 | 3754.N16.gz43_533090 | M00084246A:D03 | chiron(cc187-NormBPHProstate) |
| 1251 | 556339 | 3754.N19.gz43_533138 | M00084246B:D10 | chiron(cc187-NormBPHProstate) |
| 1252 | 660907 | 3754.N22.gz43_533186 | M00084246B:H03 | chiron(cc187-NormBPHProstate) |
| 1253 | 404308 | 3754.O18.gz43_533123 | M00084248B:C06 | chiron(cc187-NormBPHProstate) |
| 1254 | 1202570 | 3754.O23.gz43_533203 | M00084248D:H09 | chiron(cc187-NormBPHProstate) |
| 1255 | 1226932 | 3754.P13.gz43_533044 | M00084251D:C05 | chiron(cc187-NormBPHProstate) |
| 1256 | 1054807 | 3754.P17.gz43_533108 | M00084252B:H01 | chiron(cc187-NormBPHProstate) |
| 1257 | 1053061 | 3756.A02.gz43_533237 | M00085806B:A10 | chiron(cc187- |
| | | | | ProstateCancer4 + 4) |
| 1258 | 1079765 | 3756.A11.gz43_533381 | M00085825C:D12 | chiron(cc187- |
| | | | | ProstateCancer4 + 4) |
| 1259 | 1092391 | 3756.A13.gz43_533413 | M00085830B:E09 | chiron(cc187- |
| | | | | ProstateCancer4 + 4) |
| 1260 | 1226388 | 3756.B03.gz43_533254 | M00085809A:E04 | chiron(cc187- |
| | | | | ProstateCancer4 + 4) |
| 1261 | 256 | 3756.B04.gz43_533270 | M00085811B:D12 | chiron(cc187- |
| | | | | ProstateCancer4 + 4) |
| 1262 | 730228 | 3756.B15.gz43_533446 | M00085835D:F06 | chiron(cc187- |
| | | | | ProstateCancer4 + 4) |
| 1263 | 1255037 | 3756.B21.gz43_533542 | M00085859B:A11 | chiron(cc187- |
| | | | | ProstateCancer4 + 4) |
| 1264 | 1080716 | 3756.B22.gz43_533558 | M00085861C:A03 | chiron(cc187- |
| | | | | ProstateCancer4 + 4) |
| 1265 | 777485 | 3756.C06.gz43_533303 | M00085814B:G08 | chiron(cc187- |
| | | | | ProstateCancer4 + 4) |
| 1266 | 449687 | 3756.C16.gz43_533463 | M00085837C:H08 | chiron(cc187- |
| | | | | ProstateCancer4 + 4) |
| 1267 | 1259906 | 3756.D08.gz43_533336 | M00085819D:C02 | chiron(cc187- |
| | | | | ProstateCancer4 + 4) |
| 1268 | 2454 | 3756.D18.gz43_533496 | M00085846A:H10 | chiron(cc187- |
| | | | | ProstateCancer4 + 4) |
| 1269 | 1106514 | 3756.D24.gz43_533592 | M00085804B:F09 | chiron(cc187- |
| | | | | ProstateCancer4 + 4) |
| 1270 | 1053078 | 3756.E01.gz43_533225 | M00085805A:G07 | chiron(cc187- |
| | | | | ProstateCancer4 + 4) |
| 1271 | 1053014 | 3756.E06.gz43_533305 | M00085814C:C12 | chiron(cc187- |
| | | | | ProstateCancer4 + 4) |
| 1272 | 558976 | 3756.E12.gz43_533401 | M00085827C:F03 | chiron(cc187- |
| | | | | ProstateCancer4 + 4) |
| 1273 | 492111 | 3756.E22.gz43_533561 | M00085860D:H02 | chiron(cc187- |
| | | | | ProstateCancer4 + 4) |
| 1274 | 9249 | 3756.F11.gz43_533386 | M00085826D:B03 | chiron(cc187- |
| | | | | ProstateCancer4 + 4) |
| 1275 | 1138799 | 3756.F16.gz43_533466 | M00085839B:B12 | chiron(cc187- |
| | | | | ProstateCancer4 + 4) |
| 1276 | 1052216 | 3756.G07.gz43_533323 | M00085817B:B08 | chiron(cc187- |
| | | | | ProstateCancer4 + 4) |
| 1277 | 714840 | 3756.G12.gz43_533403 | M00085827D:D01 | chiron(cc187- |
| | | | | ProstateCancer4 + 4) |
| 1278 | 372541 | 3756.G14.gz43_533435 | M00085832D:G02 | chiron(cc187- |
| | | | | ProstateCancer4 + 4) |
| 1279 | 374098 | 3756.I03.gz43_533261 | M00085808C:E12 | chiron(cc187- |
| | | | | ProstateCancer4 + 4) |
| 1280 | 8756 | 3756.J05.gz43_533294 | M00085814A:C02 | chiron(cc187- |
| | | | | ProstateCancer4 + 4) |
| 1281 | 486961 | 3756.K03.gz43_533263 | M00085808D:E01 | chiron(cc187- |
| | | | | ProstateCancer4 + 4) |
| 1282 | 617714 | 3756.K07.gz43_533327 | M00085817C:C10 | chiron(cc187- |
| | | | | ProstateCancer4 + 4) |
| 1283 | 2946 | 3756.K15.gz43_533455 | M00085835B:E11 | chiron(cc187- |
| | | | | ProstateCancer4 + 4) |
| 1284 | 1227963 | 3756.K18.gz43_533503 | M00085844C:H11 | chiron(cc187- |
| | | | | ProstateCancer4 + 4) |
| 1285 | 1206161 | 3756.K20.gz43_533535 | M00085854C:E06 | chiron(cc187- |
| | | | | ProstateCancer4 + 4) |
| 1286 | 608560 | 3756.L02.gz43_533248 | M00085807D:G11 | chiron(cc187- |
| | | | | ProstateCancer4 + 4) |
| 1287 | 16155 | 3756.L03.gz43_533264 | M00085810A:A10 | chiron(cc187- |
| | | | | ProstateCancer4 + 4) |
| 1288 | 1194431 | 3756.L19.gz43_533520 | M00085854A:D09 | chiron(cc187- |
| | | | | ProstateCancer4 + 4) |
| 1289 | 174730 | 3756.M06.gz43_533313 | M00085815C:E11 | chiron(cc187- |
| | | | | ProstateCancer4 + 4) |
| 1290 | 372741 | 3756.M07.gz43_533329 | M00085817C:G05 | chiron(cc187- |
| | | | | ProstateCancer4 + 4) |
| 1291 | 380070 | 3756.M20.gz43_533537 | M00085854C:F04 | chiron(cc187- |
| | | | | ProstateCancer4 + 4) |
| 1292 | 974635 | 3756.N18.gz43_533506 | M00085849D:G06 | chiron(cc187- |
| | | | | ProstateCancer4 + 4) |
| 1293 | 1252747 | 3756.N21.gz43_533554 | M00085860B:D10 | chiron(cc187- |
| | | | | ProstateCancer4 + 4) |
| 1294 | 525759 | 3756.O03.gz43_533267 | M00085809A:C05 | chiron(cc187- |
| | | | | ProstateCancer4 + 4) |
| 1295 | 386109 | 3756.O07.gz43_533331 | M00085817D:C04 | chiron(cc187- |
| | | | | ProstateCancer4 + 4) |
| 1296 | 401342 | 3756.O08.gz43_533347 | M00085819C:F06 | chiron(cc187- |
| | | | | ProstateCancer4 + 4) |
| 1297 | 1260177 | 3756.P08.gz43_533348 | M00085820D:D02 | chiron(cc187- |
| | | | | ProstateCancer4 + 4) |
| 1298 | 720454 | 3759.C01.gz43_533607 | M00085068C:B03 | chiron(cc187-NormBPHProstate) |
| 1299 | 875843 | 3759.D15.gz43_533832 | M00085092D:D09 | chiron(cc187-NormBPHProstate) |
| 1300 | 402851 | 3759.H08.gz43_533724 | M00085082C:B04 | chiron(cc187-NormBPHProstate) |
| 1301 | 21370 | 3759.H15.gz43_533836 | M00085100A:A12 | chiron(cc187-NormBPHProstate) |
| 1302 | 1196268 | 3759.H17.gz43_533868 | M00085105C:D01 | chiron(cc187-NormBPHProstate) |
| 1303 | 185432 | 3759.H23.gz43_533964 | M00085066B:D12 | chiron(cc187-NormBPHProstate) |
| 1304 | 1268161 | 3759.I05.gz43_533677 | M00085076C:A07 | chiron(cc187-NormBPHProstate) |
| 1305 | 44737 | 3759.I19.gz43_533901 | M00085107D:H08 | chiron(cc187-NormBPHProstate) |
| 1306 | 400734 | 3759.K05.gz43_533679 | M00085076C:H01 | chiron(cc187-NormBPHProstate) |
| 1307 | 413573 | 3759.K17.gz43_533871 | M00085104C:A10 | chiron(cc187-NormBPHProstate) |
| 1308 | 1066654 | 3759.L02.gz43_533632 | M00085071B:D07 | chiron(cc187-NormBPHProstate) |
| 1309 | 1226365 | 3759.L09.gz43_533744 | M00085084A:E12 | chiron(cc187-NormBPHProstate) |
| 1310 | 15759 | 3759.L10.gz43_533760 | M00085085C:D10 | chiron(cc187-NormBPHProstate) |
| 1311 | 140372 | 3759.L15.gz43_533840 | M00085100A:H07 | chiron(cc187-NormBPHProstate) |
| 1312 | 1138572 | 3759.L24.gz43_533984 | M00085068B:A07 | chiron(cc187-NormBPHProstate) |
| 1313 | 6790 | 3759.M19.gz43_533905 | M00085108A:C12 | chiron(cc187-NormBPHProstate) |
| 1314 | 1228147 | 3759.N08.gz43_533730 | M00085083A:E04 | chiron(cc187-NormBPHProstate) |
| 1315 | 43678 | 3759.N16.gz43_533858 | M00085103D:H12 | chiron(cc187-NormBPHProstate) |
| 1316 | 1116992 | 3759.N23.gz43_533970 | M00085066D:A05 | chiron(cc187-NormBPHProstate) |
| 1317 | 393261 | 3759.O16.gz43_533859 | M00085101C:H03 | chiron(cc187-NormBPHProstate) |
| 1318 | 378459 | 3759.P03.gz43_533652 | M00085074B:A07 | chiron(cc187-NormBPHProstate) |
| 1319 | 242707 | 3759.P13.gz43_533812 | M00085090C:C09 | chiron(cc187-NormBPHProstate) |
| 1320 | 69 | 3759.P15.gz43_533844 | M00085100B:C12 | chiron(cc187-NormBPHProstate) |
| 1321 | 12613 | 3759.P17.gz43_533876 | M00085105D:H02 | chiron(cc187-NormBPHProstate) |
| 1322 | 1052108 | 3762.A09.gz43_534117 | M00084772C:G12 | chiron(cc187-NormBPHProstate) |
| 1323 | 1191547 | 3762.A16.gz43_534229 | M00084773C:H08 | chiron(cc187-NormBPHProstate) |
| 1324 | 204985 | 3762.A19.gz43_534277 | M00084773C:F08 | chiron(cc187-NormBPHProstate) |
| 1325 | 1054813 | 3762.A20.gz43_534293 | M00084773C:D04 | chiron(cc187-NormBPHProstate) |
| 1326 | 687223 | 3762.B05.gz43_534054 | M00084774B:C10 | chiron(cc187-NormBPHProstate) |
| 1327 | 1225719 | 3762.B15.gz43_534214 | M00084775C:E05 | chiron(cc187-NormBPHProstate) |
| 1328 | 1139522 | 3762.C20.gz43_534295 | M00084779D:H10 | chiron(cc187-NormBPHProstate) |
| 1329 | 408711 | 3762.C23.gz43_534343 | M00084779B:D03 | chiron(cc187-NormBPHProstate) |
| 1330 | 770834 | 3762.D03.gz43_534024 | M00084780C:F08 | chiron(cc187-NormBPHProstate) |
| 1331 | 961790 | 3762.D04.gz43_534040 | M00084780D:D07 | chiron(cc187-NormBPHProstate) |
| 1332 | 1118470 | 3762.D18.gz43_534264 | M00084781A:H09 | chiron(cc187-NormBPHProstate) |
| 1333 | 140314 | 3762.D19.gz43_534280 | M00084781A:E05 | chiron(cc187-NormBPHProstate) |
| 1334 | 684638 | 3762.D22.gz43_534328 | M00084781A:A05 | chiron(cc187-NormBPHProstate) |
| 1335 | 1054648 | 3762.E01.gz43_533993 | M00084782D:H08 | chiron(cc187-NormBPHProstate) |
| 1336 | 454214 | 3762.E10.gz43_534137 | M00084782D:D10 | chiron(cc187-NormBPHProstate) |
| 1337 | 77856 | 3762.E15.gz43_534217 | M00084783C:A09 | chiron(cc187-NormBPHProstate) |
| 1338 | 4745 | 3762.E23.gz43_534345 | M00084783C:G08 | chiron(cc187-NormBPHProstate) |
| 1339 | 557063 | 3762.F08.gz43_534106 | M00084784B:A02 | chiron(cc187-NormBPHProstate) |
| 1340 | 1087318 | 3762.F22.gz43_534330 | M00084787B:D12 | chiron(cc187-NormBPHProstate) |
| 1341 | 1056369 | 3762.G18.gz43_534267 | M00084789D:B10 | chiron(cc187-NormBPHProstate) |
| 1342 | 996888 | 3762.H12.gz43_534172 | M00084791D:D01 | chiron(cc187-NormBPHProstate) |
| 1343 | 968647 | 3762.I07.gz43_534093 | M00084794B:C01 | chiron(cc187-NormBPHProstate) |
| 1344 | 453767 | 3762.J03.gz43_534030 | M00084796D:B01 | chiron(cc187-NormBPHProstate) |
| 1345 | 1014734 | 3762.J18.gz43_534270 | M00084799C:E08 | chiron(cc187-NormBPHProstate) |
| 1346 | 86612 | 3762.K02.gz43_534015 | M00084800B:H09 | chiron(cc187-NormBPHProstate) |
| 1347 | 551691 | 3762.K20.gz43_534303 | M00084802A:H09 | chiron(cc187-NormBPHProstate) |
| 1348 | 691512 | 3762.L18.gz43_534272 | M00084804C:H10 | chiron(cc187-NormBPHProstate) |
| 1349 | 1259069 | 3762.L20.gz43_534304 | M00084804B:E01 | chiron(cc187-NormBPHProstate) |
| 1350 | 683650 | 3762.M04.gz43_534049 | M00084805D:E02 | chiron(cc187-NormBPHProstate) |
| 1351 | 447151 | 3762.M17.gz43_534257 | M00084807D:F07 | chiron(cc187-NormBPHProstate) |
| 1352 | 1052058 | 3762.M23.gz43_534353 | M00084808D:A07 | chiron(cc187-NormBPHProstate) |

[0392] Summary of Polynucleotides of the Invention

[0393] Table 11 (inserted prior to claims) provides a summary of polynucleotides isolated as described. Specifically, Table 11 provides: 1) the SEQ ID NO (“SEQ ID”) assigned to each sequence for use in the present specification; 2) the Cluster Identification No. (“CLUSTER”); 3) the Sequence Name assigned to each sequence; 3) the sequence name (“SEQ NAME”) used as an internal identifier of the sequence; 4) the name assigned to the clone from which the sequence was isolated (“CLONE ID”); and 5) the name of the library from which the sequence was isolated (“LIBRARY”). Because at least some of the provided polynucleotides represent partial mRNA transcripts, two or more polynucleotides may represent different regions of the same mRNA transcript and the same gene and/or may be contained within the same clone. Thus, for example, if two or more SEQ ID NOS: are identified as belonging to the same clone, then either sequence can be used to obtain the full-length mRNA or gene. Clones which comprise the sequences described herein were deposited as set out in the tables indicated below (see Example entitled “Deposit Information”).

### Example 18

### Contig Assembly

[0394] The sequences of the polynucleotides provided in the present invention can be used to extend the sequence information of the gene to which the polynucleotides correspond (e.g., a gene, or mRNA encoded by the gene, having a sequence of the polynucleotide described herein). This expanded sequence information can in turn be used to further characterize the corresponding gene, which in turn provides additional information about the nature of the gene product (e.g., the normal function of the gene product). The additional information can serve to provide additional evidence of the gene product's use as a therapeutic target, and provide further guidance as to the types of agents that can modulate its activity.

[0395] For example, a contig was assembled using the sequence of a polynucleotide described herein. A “contig” is a contiguous sequence of nucleotides that is assembled from nucleic acid sequences having overlapping (e.g., shared or substantially similar) sequence information. The sequences of publicly-available ESTs (Expressed Sequence Tags) and the sequences of various of the above-described polynucleotides were used in the contig assembly. The contig was assembled using the software program Sequencher, version 4.05, according to the manufacturer's instructions. The sequence information obtained in the contig assembly was then used to obtain a consensus sequence derived from the contig using the Sequencher program. The resulting consensus sequence was used to search both the public databases as well as databases internal to the applicants to match the consensus polynucleotide with homology data and/or differential gene expressed data.

[0396] The final result provided the sequences listed as SEQ ID NOS: 1353-1561 in the accompanying Sequence Listing and summarized in Tables 12 and 13 (inserted prior to claims). Table 12 provides a summary of the consensus sequences assembled as described. Specifically, Table 3 provides: 1) the SEQ ID NO (“SEQ ID”) assigned to each consensus sequence for use in the present specification; 2) the Cluster Identification No. (“CLUSTER”); and 3) the consensus sequence name (“CONSENSUS SEQ NAME”) used as an internal identifier of the sequence.

TABLE 12

| SEQ ID | CLUSTER | CONSENSUS SEQ NAME |
|---|---|---|
| 1353 | 46 | Clu46.con_5 |
| 1354 | 8293 | Clu8293.con_1 |
| 1355 | 34201 | Clu34201.con_1 |
| 1356 | 48343 | Clu48343.con_1 |
| 1357 | 89833 | Clu89833.con_2 |
| 1358 | 140314 | Clu140314.con_2 |
| 1359 | 141870 | Clu141870.con_1 |
| 1360 | 180092 | Clu180092.con_1 |
| 1361 | 189355 | Clu189355.con_1 |
| 1362 | 234667 | Clu234667.con_1 |
| 1363 | 242901 | Clu242901.con_1 |
| 1364 | 307985 | Clu307985.con_1 |
| 1365 | 387610 | Clu387610.con_1 |
| 1366 | 389995 | Clu389995.con_2 |
| 1367 | 393948 | Clu393948.con_1 |
| 1368 | 397313 | Clu397313.con_1 |
| 1369 | 398439 | Clu398439.con_1 |
| 1370 | 402150 | Clu402150.con_1 |
| 1371 | 402789 | Clu402789.con_1 |
| 1372 | 403488 | Clu403488.con_1 |
| 1373 | 413505 | Clu413505.con_1 |
| 1374 | 418320 | Clu418320.con_1 |
| 1375 | 424678 | Clu424678.con_1 |
| 1376 | 426138 | Clu426138.con_1 |
| 1377 | 427904 | Clu427904.con_1 |
| 1378 | 447151 | Clu447151.con_1 |
| 1379 | 452564 | Clu452564.con_1 |
| 1380 | 454826 | Clu454826.con_1 |
| 1381 | 460499 | Clu460499.con_1 |
| 1382 | 477110 | Clu477110.con_1 |
| 1383 | 477708 | Clu477708.con_1 |
| 1384 | 478212 | Clu478212.con_1 |
| 1385 | 484459 | Clu484459.con_1 |
| 1386 | 494499 | Clu494499.con_1 |
| 1387 | 494890 | Clu494890.con_1 |
| 1388 | 500919 | Clu500919.con_1 |
| 1389 | 504038 | Clu504038.con_1 |
| 1390 | 504904 | Clu504904.con_2 |
| 1391 | 505750 | Clu505750.con_1 |
| 1392 | 517444 | Clu517444.con_1 |
| 1393 | 528281 | Clu528281.con_1 |
| 1394 | 529709 | Clu529709.con_1 |
| 1395 | 532062 | Clu532062.con_1 |
| 1396 | 542301 | Clu542301.con_1 |
| 1397 | 542825 | Clu542825.con_1 |
| 1398 | 548217 | Clu548217.con_1 |
| 1399 | 548277 | Clu548277.con_1 |
| 1400 | 554189 | Clu554189.con_2 |
| 1401 | 555115 | Clu555115.con_2 |
| 1402 | 555967 | Clu555967.con_1 |
| 1403 | 557717 | Clu557717.con_1 |
| 1404 | 566548 | Clu566548.con_1 |
| 1405 | 567700 | Clu567700.con_2 |
| 1406 | 573169 | Clu573169.con_1 |
| 1407 | 585099 | Clu585099.con_1 |
| 1408 | 585899 | Clu585899.con_1 |
| 1409 | 609914 | Clu609914.con_1 |
| 1410 | 613411 | Clu613411.con_1 |
| 1411 | 621702 | Clu621702.con_1 |
| 1412 | 637915 | Clu637915.con_1 |
| 1413 | 640157 | Clu640157.con_1 |
| 1414 | 640277 | Clu640277.con_1 |
| 1415 | 645986 | Clu645986.con_1 |
| 1416 | 647587 | Clu647587.con_2 |
| 1417 | 652651 | Clu652651.con_1 |
| 1418 | 653817 | Clu653817.con_1 |
| 1419 | 660907 | Clu660907.con_1 |
| 1420 | 661802 | Clu661802.con_1 |
| 1421 | 676665 | Clu676665.con_1 |
| 1422 | 684638 | Clu684638.con_1 |
| 1423 | 691512 | Clu691512.con_1 |
| 1424 | 700354 | Clu700354.con_1 |
| 1425 | 708025 | Clu708025.con_1 |
| 1426 | 710194 | Clu710194.con_1 |
| 1427 | 733840 | Clu733840.con_1 |
| 1428 | 734568 | Clu734568.con_1 |
| 1429 | 742101 | Clu742101.con_1 |
| 1430 | 747805 | Clu747805.con_1 |
| 1431 | 761460 | Clu761460.con_1 |
| 1432 | 765500 | Clu765500.con_1 |
| 1433 | 770834 | Clu770834.con_1 |
| 1434 | 774520 | Clu774520.con_1 |
| 1435 | 777670 | Clu777670.con_1 |
| 1436 | 812031 | Clu812031.con_1 |
| 1437 | 821536 | Clu821536.con_1 |
| 1438 | 823271 | Clu823271.con_1 |
| 1439 | 845354 | Clu845354.con_1 |
| 1440 | 846056 | Clu846056.con_1 |
| 1441 | 854573 | Clu854573.con_1 |
| 1442 | 863768 | Clu863768.con_1 |
| 1443 | 869453 | Clu869453.con_1 |
| 1444 | 875978 | Clu875978.con_2 |
| 1445 | 893981 | Clu893981.con_1 |
| 1446 | 945247 | Clu945247.con_1 |
| 1447 | 947168 | Clu947168.con_1 |
| 1448 | 961757 | Clu961757.con_1 |
| 1449 | 968647 | Clu968647.con_1 |
| 1450 | 970165 | Clu970165.con_1 |
| 1451 | 991366 | Clu991366.con_1 |
| 1452 | 1014734 | Clu1014734.con_1 |
| 1453 | 1037887 | Clu1037887.con_1 |
| 1454 | 1052399 | Clu1052399.con_1 |
| 1455 | 1052466 | Clu1052466.con_1 |
| 1456 | 1053121 | Clu1053121.con_1 |
| 1457 | 1053514 | Clu1053514.con_1 |
| 1458 | 1053747 | Clu1053747.con_1 |
| 1459 | 1053799 | Clu1053799.con_1 |
| 1460 | 1053854 | Clu1053854.con_1 |
| 1461 | 1054038 | Clu1054038.con_1 |
| 1462 | 1054069 | Clu1054069.con_1 |
| 1463 | 1054074 | Clu1054074.con_1 |
| 1464 | 1054807 | Clu1054807.con_1 |
| 1465 | 1054813 | Clu1054813.con_1 |
| 1466 | 1054884 | Clu1054884.con_1 |
| 1467 | 1055018 | Clu1055018.con_1 |
| 1468 | 1055063 | Clu1055063.con_1 |
| 1469 | 1055089 | Clu1055089.con_1 |
| 1470 | 1055256 | Clu1055256.con_1 |
| 1471 | 1055326 | Clu1055326.con_1 |
| 1472 | 1056369 | Clu1056369.con_1 |
| 1473 | 1059332 | Clu1059332.con_1 |
| 1474 | 1059445 | Clu1059445.con_1 |
| 1475 | 1060021 | Clu1060021.con_1 |
| 1476 | 1061206 | Clu1061206.con_1 |
| 1477 | 1062537 | Clu1062537.con_1 |
| 1478 | 1064975 | Clu1064975.con_1 |
| 1479 | 1065531 | Clu1065531.con_1 |
| 1480 | 1066041 | Clu1066041.con_1 |
| 1481 | 1069578 | Clu1069578.con_1 |
| 1482 | 1069632 | Clu1069632.con_1 |
| 1483 | 1073767 | Clu1073767.con_1 |
| 1484 | 1074160 | Clu1074160.con_1 |
| 1485 | 1076930 | Clu1076930.con_1 |
| 1486 | 1077033 | Clu1077033.con_1 |
| 1487 | 1079196 | Clu1079196.con_1 |
| 1488 | 1079863 | Clu1079863.con_1 |
| 1489 | 1085638 | Clu1085638.con_1 |
| 1490 | 1085645 | Clu1085645.con_1 |
| 1491 | 1088847 | Clu1088847.con_1 |
| 1492 | 1088930 | Clu1088930.con_1 |
| 1493 | 1108332 | Clu1108332.con_2 |
| 1494 | 1110143 | Clu1110143.con_1 |
| 1495 | 1116087 | Clu1116087.con_1 |
| 1496 | 1131409 | Clu1131409.con_1 |
| 1497 | 1132413 | Clu1132413.con_1 |
| 1498 | 1136803 | Clu1136803.con_1 |
| 1499 | 1138419 | Clu1138419.con_1 |
| 1500 | 1138593 | Clu1138593.con_1 |
| 1501 | 1139522 | Clu1139522.con_2 |
| 1502 | 1139691 | Clu1139691.con_1 |
| 1503 | 1142019 | Clu1142019.con_1 |
| 1504 | 1171518 | Clu1171518.con_2 |
| 1505 | 1176182 | Clu1176182.con_1 |
| 1506 | 1182447 | Clu1182447.con_1 |
| 1507 | 1183079 | Clu1183079.con_1 |
| 1508 | 1184134 | Clu1184134.con_1 |
| 1509 | 1189027 | Clu1189027.con_1 |
| 1510 | 1191547 | Clu1191547.con_1 |
| 1511 | 1193236 | Clu1193236.con_1 |
| 1512 | 1210953 | Clu1210953.con_1 |
| 1513 | 1211899 | Clu1211899.con_1 |
| 1514 | 1218793 | Clu1218793.con_1 |
| 1515 | 1223271 | Clu1223271.con_1 |
| 1516 | 1223477 | Clu1223477.con_1 |
| 1517 | 1223907 | Clu1223907.con_1 |
| 1518 | 1223938 | Clu1223938.con_1 |
| 1519 | 1223948 | Clu1223948.con_1 |
| 1520 | 1224039 | Clu1224039.con_1 |
| 1521 | 1224226 | Clu1224226.con_1 |
| 1522 | 1224379 | Clu1224379.con_1 |
| 1523 | 1224422 | Clu1224422.con_1 |
| 1524 | 1224547 | Clu1224547.con_1 |
| 1525 | 1224704 | Clu1224704.con_1 |
| 1526 | 1224752 | Clu1224752.con_1 |
| 1527 | 1224881 | Clu1224881.con_2 |
| 1528 | 1225500 | Clu1225500.con_1 |
| 1529 | 1225595 | Clu1225595.con_1 |
| 1530 | 1225719 | Clu1225719.con_2 |
| 1531 | 1225734 | Clu1225734.con_1 |
| 1532 | 1226064 | Clu1226064.con_1 |
| 1533 | 1226304 | Clu1226304.con_1 |
| 1534 | 1226413 | Clu1226413.con_1 |
| 1535 | 1226932 | Clu1226932.con_1 |
| 1536 | 1227623 | Clu1227623.con_1 |
| 1537 | 1227781 | Clu1227781.con_1 |
| 1538 | 1227862 | Clu1227862.con_2 |
| 1539 | 1227912 | Clu1227912.con_1 |
| 1540 | 1227968 | Clu1227968.con_1 |
| 1541 | 1228277 | Clu1228277.con_1 |
| 1542 | 1230257 | Clu1230257.con_1 |
| 1543 | 1245188 | Clu1245188.con_1 |
| 1544 | 1250373 | Clu1250373.con_1 |
| 1545 | 1256564 | Clu1256564.con_2 |
| 1546 | 1259069 | Clu1259069.con_2 |
| 1547 | 1274736 | Clu1274736.con_1 |
| 1548 | 1283437 | Clu1283437.con_2 |
| 1549 | 1292262 | Clu1292262.con_1 |
| 1550 | 1292281 | Clu1292281.con_1 |
| 1551 | 1292289 | Clu1292289.con_1 |
| 1552 | 1292413 | Clu1292413.con_1 |
| 1553 | 1292423 | Clu1292423.con_1 |
| 1554 | 1292436 | Clu1292436.con_1 |
| 1555 | 1292439 | Clu1292439.con_1 |
| 1556 | 1292582 | Clu1292582.con_1 |
| 1557 | 1292600 | Clu1292600.con_1 |
| 1558 | 1292932 | Clu1292932.con_1 |
| 1559 | 1292996 | Clu1292996.con_1 |
| 1560 | 1293946 | Clu1293946.con_1 |
| 1561 | 1293972 | Clu1293972.con_1 |

[0397] A correlation between the polynucleotide used in consensus sequence assembly as described above and the corresponding consensus sequence is contained in Table 13. Specifically Table 13 provides: 1) the SEQ ID NO of the consensus sequence (“CONSENSUS SEQ ID”); 2) the consensus sequence name (“CONSENSUS SEQ NAME”) used as an internal identifier of the sequence; 3) the SEQ ID NO of the polynucleotide (“POLYNTD SEQ ID”) of SEQ ID NOS: 134-1352 used in assembly of the consensus sequence; and 4) the sequence name (“POLYNTD SEQ NAME”) of the polynucleotide of SEQ ID NOS: 134-1352 used in assembly of the consensus sequence.

TABLE 13

| CON- | | | |
|---|---|---|---|
| SEN- | | | |
| SUS | CONSENSUS SEQ | POLYNTD | |
| SEQ ID | NAME | SEQ ID | POLYNTD SEQ NAME |
| 1353 | Clu46.con_5 | 1192 | 3665.O06.gz43_521001 |
| 1354 | Clu8293.con_1 | 234 | 3547.I16.GZ43_505943 |
| 1355 | Clu34201.con_1 | 491 | 3565.E16.GZ43_508243 |
| 1356 | Clu48343.con_1 | 295 | 3550.O15.GZ43_506317 |
| 1357 | Clu89833.con_2 | 591 | 3574.C14.GZ43_509379 |
| 1357 | Clu89833.con_2 | 840 | 3599.K04.GZ43_512924 |
| 1358 | Clu140314.con_2 | 563 | 3571.H01.GZ43_508792 |
| 1358 | Clu140314.con_2 | 1333 | 3762.D19.gz43_534280 |
| 1359 | Clu141870.con_1 | 427 | 3559.F17.GZ43_507492 |
| 1359 | Clu141870.con_1 | 512 | 3565.P03.GZ43_508046 |
| 1360 | Clu180092.con_1 | 849 | 3599.N20.GZ43_513183 |
| 1360 | Clu180092.con_1 | 266 | 3550.F06.GZ43_506164 |
| 1361 | Clu189355.con_1 | 1163 | 3664.D06.gz43_520606 |
| 1361 | Clu189355.con_1 | 1109 | 3661.E23.gz43_519727 |
| 1361 | Clu189355.con_1 | 1157 | 3663.N12.gz43_520328 |
| 1362 | Clu234667.con_1 | 309 | 3553.E08.GZ43_506579 |
| 1362 | Clu234667.con_1 | 747 | 3583.P22.GZ43_510672 |
| 1363 | Clu242901.con_1 | 332 | 3553.K05.GZ43_506537 |
| 1363 | Clu242901.con_1 | 561 | 3571.G22.GZ43_509127 |
| 1364 | Clu307985.con_1 | 254 | 3547.P18.GZ43_505982 |
| 1365 | Clu387610.con_1 | 552 | 3571.C08.GZ43_508899 |
| 1366 | Clu389995.con_2 | 523 | 3568.F06.GZ43_508486 |
| 1366 | Clu389995.con_2 | 776 | 3590.L08.GZ43_512221 |
| 1367 | Clu393948.con_1 | 473 | 3562.K08.GZ43_507737 |
| 1368 | Clu397313.con_1 | 880 | 3605.G13.gz43_513832 |
| 1368 | Clu397313.con_1 | 957 | 3617.F10.gz43_515319 |
| 1369 | Clu398439.con_1 | 224 | 3547.E04.GZ43_505747 |
| 1370 | Clu402150.con_1 | 214 | 3544.O20.GZ43_505629 |
| 1371 | Clu402789.con_1 | 416 | 3559.B04.GZ43_507280 |
| 1372 | Clu403488.con_1 | 768 | 3590.J01.GZ43_512107 |
| 1372 | Clu403488.con_1 | 917 | 3611.E07.gz43_514502 |
| 1373 | Clu413505.con_1 | 378 | 3556.D20.GZ43_507154 |
| 1374 | Clu418320.con_1 | 166 | 3541.I18.GZ43_505207 |
| 1374 | Clu418320.con_1 | 555 | 3571.E02.GZ43_508805 |
| 1374 | Clu418320.con_1 | 889 | 3605.N12.gz43_513823 |
| 1375 | Clu424678.con_1 | 139 | 3541.A23.GZ43_505279 |
| 1376 | Clu426138.con_1 | 177 | 3541.P22.GZ43_505278 |
| 1377 | Clu427904.con_1 | 696 | 3580.N14.GZ43_510158 |
| 1378 | Clu447151.con_1 | 1351 | 3762.M17.gz43_534257 |
| 1378 | Clu447151.con_1 | 606 | 3574.I07.GZ43_509273 |
| 1379 | Clu452564.con_1 | 203 | 3544.K16.GZ43_505561 |
| 1379 | Clu452564.con_1 | 1034 | 3632.M13.gz43_517517 |
| 1380 | Clu454826.con_1 | 220 | 3547.C17.GZ43_505953 |
| 1380 | Clu454826.con_1 | 430 | 3559.H24.GZ43_507606 |
| 1381 | Clu460499.con_1 | 330 | 3553.K02.GZ43_506489 |
| 1382 | Clu477110.con_1 | 235 | 3547.I17.GZ43_505959 |
| 1382 | Clu477110.con_1 | 490 | 3565.D19.GZ43_508290 |
| 1382 | Clu477110.con_1 | 587 | 3574.B24.GZ43_509538 |
| 1383 | Clu477708.con_1 | 514 | 3565.P22.GZ43_508350 |
| 1384 | Clu478212.con_1 | 317 | 3553.G21.GZ43_506789 |
| 1384 | Clu478212.con_1 | 246 | 3547.M02.GZ43_505723 |
| 1384 | Clu478212.con_1 | 230 | 3547.G22.GZ43_506037 |
| 1385 | Clu484459.con_1 | 1052 | 3635.M18.gz43_517981 |
| 1385 | Clu484459.con_1 | 1125 | 3662.C15.gz43_519981 |
| 1386 | Clu494499.con_1 | 197 | 3544.I15.GZ43_505543 |
| 1386 | Clu494499.con_1 | 572 | 3571.J14.GZ43_509002 |
| 1386 | Clu494499.con_1 | 725 | 3583.H15.GZ43_510552 |
| 1387 | Clu494890.con_1 | 300 | 3550.P23.GZ43_506446 |
| 1387 | Clu494890.con_1 | 605 | 3574.I02.GZ43_509193 |
| 1387 | Clu494890.con_1 | 791 | 3596.D17.GZ43_512741 |
| 1388 | Clu500919.con_1 | 1222 | 3754.B05.gz43_532902 |
| 1388 | Clu500919.con_1 | 226 | 3547.F10.GZ43_505844 |
| 1389 | Clu504038.con_1 | 935 | 3611.N09.gz43_514543 |
| 1389 | Clu504038.con_1 | 1112 | 3661.G20.gz43_519681 |
| 1390 | Clu504904.con_2 | 1167 | 3664.E23.gz43_520879 |
| 1391 | Clu505750.con_1 | 145 | 3538.G22.GZ43_504885 |
| 1391 | Clu505750.con_1 | 186 | 3544.E18.GZ43_505587 |
| 1392 | Clu517444.con_1 | 1021 | 3629.H10.gz43_517080 |
| 1392 | Clu517444.con_1 | 1134 | 3662.K03.gz43_519797 |
| 1393 | Clu528281.con_1 | 172 | 3541.M18.GZ43_505211 |
| 1393 | Clu528281.con_1 | 218 | 3547.A24.GZ43_506063 |
| 1394 | Clu529709.con_1 | 348 | 3553.K24.GZ43_506841 |
| 1394 | Clu529709.con_1 | 395 | 3556.K12.GZ43_507033 |
| 1395 | Clu532062.con_1 | 681 | 3580.K03.GZ43_509979 |
| 1395 | Clu532062.con_1 | 779 | 3590.M04.GZ43_512158 |
| 1396 | Clu542301.con_1 | 237 | 3547.J05.GZ43_505768 |
| 1396 | Clu542301.con_1 | 147 | 3538.H21.GZ43_504870 |
| 1397 | Clu542825.con_1 | 210 | 3544.N19.GZ43_505612 |
| 1397 | Clu542825.con_1 | 336 | 3538.A24.GZ43_504911 |
| 1398 | Clu548217.con_1 | 667 | 3580.G19.GZ43_510231 |
| 1398 | Clu548217.con_1 | 1175 | 3664.K16.gz43_520773 |
| 1399 | Clu548277.con_1 | 1006 | 3626.I20.gz43_516857 |
| 1400 | Clu554189.con_2 | 366 | 3553.P21.GZ43_506798 |
| 1401 | Clu555115.con_2 | 1185 | 3665.E20.gz43_521215 |
| 1402 | Clu555967.con_1 | 835 | 3599.F24.GZ43_513239 |
| 1402 | Clu555967.con_1 | 788 | 3596.D01.GZ43_512485 |
| 1403 | Clu557717.con_1 | 815 | 3596.O12.GZ43_512672 |
| 1403 | Clu557717.con_1 | 143 | 3538.G17.GZ43_504805 |
| 1403 | Clu557717.con_1 | 710 | 3583.B11.GZ43_510482 |
| 1404 | Clu566548.con_1 | 662 | 3580.E23.GZ43_510293 |
| 1405 | Clu567700.con_2 | 584 | 3574.B04.GZ43_509218 |
| 1406 | Clu573169.con_1 | 381 | 3556.E24.GZ43_507219 |
| 1406 | Clu573169.con_1 | 438 | 3559.L19.GZ43_507530 |
| 1407 | Clu585099.con_1 | 411 | 3556.O13.GZ43_507053 |
| 1407 | Clu585099.con_1 | 812 | 3596.N16.GZ43_512735 |
| 1407 | Clu585099.con_1 | 867 | 3602.G17.GZ43_513512 |
| 1408 | Clu585899.con_1 | 328 | 3553.J24.GZ43_506840 |
| 1408 | Clu585899.con_1 | 320 | 3553.H21.GZ43_506790 |
| 1409 | Clu609914.con_1 | 1181 | 3665.A23.gz43_521259 |
| 1409 | Clu609914.con_1 | 1114 | 3661.H24.gz43_519746 |
| 1410 | Clu613411.con_1 | 371 | 3556.B10.GZ43_506992 |
| 1410 | Clu613411.con_1 | 708 | 3583.B07.GZ43_510418 |
| 1411 | Clu621702.con_1 | 529 | 3568.G12.GZ43_508583 |
| 1411 | Clu621702.con_1 | 655 | 3580.D07.GZ43_510036 |
| 1412 | Clu637915.con_1 | 692 | 3580.M18.GZ43_510221 |
| 1412 | Clu637915.con_1 | 1220 | 3754.A16.gz43_533077 |
| 1413 | Clu640157.con_1 | 653 | 3580.C03.GZ43_509971 |
| 1414 | Clu640277.con_1 | 358 | 3553.N08.GZ43_506588 |
| 1414 | Clu640277.con_1 | 645 | 3577.P07.GZ43_509664 |
| 1415 | Clu645986.con_1 | 136 | 3541.A04.GZ43_504975 |
| 1415 | Clu645986.con_1 | 793 | 3596.E22.GZ43_512822 |
| 1416 | Clu647587.con_2 | 431 | 3559.I05.GZ43_507303 |
| 1417 | Clu652651.con_1 | 616 | 3574.N10.GZ43_509326 |
| 1417 | Clu652651.con_1 | 1043 | 3635.D07.gz43_517796 |
| 1417 | Clu652651.con_1 | 1173 | 3664.J12.gz43_520708 |
| 1418 | Clu653817.con_1 | 229 | 3547.G09.GZ43_505829 |
| 1418 | Clu653817.con_1 | 895 | 3608.E17.gz43_514278 |
| 1419 | Clu660907.con_1 | 173 | 3541.O04.GZ43_504989 |
| 1419 | Clu660907.con_1 | 1252 | 3754.N22.gz43_533186 |
| 1420 | Clu661802.con_1 | 844 | 3599.M04.GZ43_512926 |
| 1421 | Clu676665.con_1 | 596 | 3574.E02.GZ43_509189 |
| 1421 | Clu676665.con_1 | 209 | 3544.N12.GZ43_505500 |
| 1422 | Clu684638.con_1 | 1334 | 3762.D22.gz43_534328 |
| 1422 | Clu684638.con_1 | 1067 | 3643.F07.gz43_518566 |
| 1423 | Clu691512.con_1 | 977 | 3620.E23.gz43_516133 |
| 1423 | Clu691512.con_1 | 1122 | 3662.A13.gz43_519947 |
| 1423 | Clu691512.con_1 | 1348 | 3762.L18.gz43_534272 |
| 1424 | Clu700354.con_1 | 487 | 3565.C17.GZ43_508257 |
| 1425 | Clu708025.con_1 | 249 | 3547.M16.GZ43_505947 |
| 1425 | Clu708025.con_1 | 719 | 3583.G16.GZ43_510567 |
| 1426 | Clu710194.con_1 | 283 | 3550.K05.GZ43_506153 |
| 1426 | Clu710194.con_1 | 383 | 3556.G15.GZ43_507077 |
| 1426 | Clu710194.con_1 | 519 | 3568.C22.GZ43_508739 |
| 1427 | Clu733840.con_1 | 1056 | 3635.P18.gz43_517984 |
| 1427 | Clu733840.con_1 | 1131 | 3662.J08.gz43_519876 |
| 1427 | Clu733840.con_1 | 1187 | 3665.K01.gz43_520917 |
| 1428 | Clu734568.con_1 | 857 | 3602.B22.GZ43_513587 |
| 1428 | Clu734568.con_1 | 886 | 3605.M17.gz43_513902 |
| 1429 | Clu742101.con_1 | 477 | 3562.O18.GZ43_507901 |
| 1429 | Clu742101.con_1 | 1201 | 3666.A24.gz43_521659 |
| 1430 | Clu747805.con_1 | 744 | 3583.O17.GZ43_510591 |
| 1430 | Clu747805.con_1 | 817 | 3596.P04.GZ43_512545 |
| 1431 | Clu761460.con_1 | 947 | 3614.K22.gz43_515132 |
| 1431 | Clu761460.con_1 | 1045 | 3635.F06.gz43_517782 |
| 1431 | Clu761460.con_1 | 1166 | 3664.E18.gz43_520799 |
| 1432 | Clu765500.con_1 | 1210 | 3666.I12.gz43_521475 |
| 1433 | Clu770834.con_1 | 799 | 3596.H22.GZ43_512825 |
| 1433 | Clu770834.con_1 | 1330 | 3762.D03.gz43_534024 |
| 1434 | Clu774520.con_1 | 363 | 3553.P05.GZ43_506542 |
| 1434 | Clu774520.con_1 | 380 | 3556.E13.GZ43_507043 |
| 1435 | Clu777670.con_1 | 714 | 3583.E13.GZ43_510517 |
| 1435 | Clu777670.con_1 | 803 | 3596.J13.GZ43_512683 |
| 1436 | Clu812031.con_1 | 162 | 3541.G17.GZ43_505189 |
| 1436 | Clu812031.con_1 | 184 | 3544.B18.GZ43_505584 |
| 1437 | Clu821536.con_1 | 278 | 3550.I03.GZ43_506119 |
| 1437 | Clu821536.con_1 | 746 | 3583.P19.GZ43_510624 |
| 1438 | Clu823271.con_1 | 386 | 3556.H12.GZ43_507030 |
| 1439 | Clu845354.con_1 | 892 | 3608.B12.gz43_514195 |
| 1440 | Clu846056.con_1 | 357 | 3553.N07.GZ43_506572 |
| 1440 | Clu846056.con_1 | 1060 | 3638.H07.gz43_518184 |
| 1441 | Clu854573.con_1 | 1035 | 3632.M19.gz43_517613 |
| 1441 | Clu854573.con_1 | 841 | 3599.K23.GZ43_513228 |
| 1442 | Clu863768.con_1 | 417 | 3559.B06.GZ43_507312 |
| 1443 | Clu869453.con_1 | 784 | 3590.O08.GZ43_512224 |
| 1444 | Clu875978.con_2 | 951 | 3614.O07.gz43_514896 |
| 1444 | Clu875978.con_2 | 961 | 3617.L21.gz43_515501 |
| 1445 | Clu893981.con_1 | 277 | 3550.H23.GZ43_506438 |
| 1445 | Clu893981.con_1 | 474 | 3562.L12.GZ43_507802 |
| 1446 | Clu945247.con_1 | 622 | 3577.A18.GZ43_509825 |
| 1446 | Clu945247.con_1 | 158 | 3538.O07.GZ43_504653 |
| 1446 | Clu945247.con_1 | 436 | 3559.L01.GZ43_507242 |
| 1447 | Clu947168.con_1 | 175 | 3541.O23.GZ43_505293 |
| 1448 | Clu961757.con_1 | 698 | 3580.N23.GZ43_510302 |
| 1448 | Clu961757.con_1 | 1248 | 3754.K20.gz43_533151 |
| 1449 | Clu968647.con_1 | 1104 | 3646.P17.gz43_519120 |
| 1449 | Clu968647.con_1 | 1343 | 3762.I07.gz43_534093 |
| 1450 | Clu970165.con_1 | 299 | 3550.P18.GZ43_506366 |
| 1450 | Clu970165.con_1 | 369 | 3556.B06.GZ43_506928 |
| 1450 | Clu970165.con_1 | 465 | 3562.H12.GZ43_507798 |
| 1451 | Clu991366.con_1 | 280 | 3550.I21.GZ43_506407 |
| 1451 | Clu991366.con_1 | 445 | 3559.O05.GZ43_507309 |
| 1451 | Clu991366.con_1 | 657 | 3580.E02.GZ43_509957 |
| 1452 | Clu1014734.con_1 | 344 | 3538.E15.GZ43_504771 |
| 1452 | Clu1014734.con_1 | 770 | 3590.J18.GZ43_512379 |
| 1452 | Clu1014734.con_1 | 1345 | 3762.J18.gz43_534270 |
| 1453 | Clu1037887.con_1 | 178 | 3544.A09.GZ43_505439 |
| 1453 | Clu1037887.con_1 | 272 | 3550.G10.GZ43_506229 |
| 1454 | Clu1052399.con_1 | 507 | 3565.N19.GZ43_508300 |
| 1455 | Clu1052466.con_1 | 264 | 3550.E02.GZ43_506099 |
| 1455 | Clu1052466.con_1 | 528 | 3568.G10.GZ43_508551 |
| 1456 | Clu1053121.con_1 | 619 | 3574.P07.GZ43_509280 |
| 1456 | Clu1053121.con_1 | 688 | 3580.L17.GZ43_510204 |
| 1457 | Clu1053514.con_1 | 1053 | 3635.O01.gz43_517711 |
| 1457 | Clu1053514.con_1 | 1155 | 3663.N09.gz43_520280 |
| 1458 | Clu1053747.con_1 | 890 | 3605.N16.gz43_513887 |
| 1458 | Clu1053747.con_1 | 932 | 3611.M18.gz43_514686 |
| 1459 | Clu1053799.con_1 | 467 | 3562.I02.GZ43_507639 |
| 1460 | Clu1053854.con_1 | 898 | 3608.G09.gz43_514152 |
| 1460 | Clu1053854.con_1 | 1039 | 3632.P07.gz43_517424 |
| 1461 | Clu1054038.con_1 | 271 | 3550.G08.GZ43_506197 |
| 1461 | Clu1054038.con_1 | 288 | 3550.L23.GZ43_506442 |
| 1461 | Clu1054038.con_1 | 419 | 3559.B10.GZ43_507376 |
| 1462 | Clu1054069.con_1 | 741 | 3583.N09.GZ43_510462 |
| 1463 | Clu1054074.con_1 | 231 | 3547.H12.GZ43_505878 |
| 1464 | Clu1054807.con_1 | 221 | 3547.C23.GZ43_506049 |
| 1464 | Clu1054807.con_1 | 1256 | 3754.P17.gz43_533108 |
| 1465 | Clu1054813.con_1 | 392 | 3556.J14.GZ43_507064 |
| 1465 | Clu1054813.con_1 | 1325 | 3762.A20.gz43_534293 |
| 1465 | Clu1054813.con_1 | 324 | 3553.J14.GZ43_506680 |
| 1466 | Clu1054884.con_1 | 581 | 3571.O08.GZ43_508911 |
| 1466 | Clu1054884.con_1 | 571 | 3571.J09.GZ43_508922 |
| 1467 | Clu1055018.con_1 | 483 | 3565.B13.GZ43_508192 |
| 1468 | Clu1055063.con_1 | 504 | 3565.M20.GZ43_508315 |
| 1469 | Clu1055089.con_1 | 326 | 3553.J17.GZ43_506728 |
| 1469 | Clu1055089.con_1 | 570 | 3571.J08.GZ43_508906 |
| 1469 | Clu1055089.con_1 | 763 | 3590.H06.GZ43_512185 |
| 1470 | Clu1055256.con_1 | 945 | 3614.H22.gz43_515129 |
| 1470 | Clu1055256.con_1 | 1037 | 3632.N21.gz43_517646 |
| 1470 | Clu1055256.con_1 | 1156 | 3663.N10.gz43_520296 |
| 1471 | Clu1055326.con_1 | 1030 | 3632.G01.gz43_517319 |
| 1471 | Clu1055326.con_1 | 1176 | 3664.K19.gz43_520821 |
| 1472 | Clu1056369.con_1 | 239 | 3547.J20.GZ43_506008 |
| 1472 | Clu1056369.con_1 | 372 | 3556.B14.GZ43_507056 |
| 1472 | Clu1056369.con_1 | 1341 | 3762.G18.gz43_534267 |
| 1473 | Clu1059332.con_1 | 583 | 3574.B01.GZ43_509170 |
| 1474 | Clu1059445.con_1 | 245 | 3547.L22.GZ43_506042 |
| 1475 | Clu1060021.con_1 | 232 | 3547.H14.GZ43_505910 |
| 1475 | Clu1060021.con_1 | 253 | 3547.O14.GZ43_505917 |
| 1476 | Clu1061206.con_1 | 973 | 3620.E12.gz43_515957 |
| 1476 | Clu1061206.con_1 | 1088 | 3646.C06.gz43_518931 |
| 1476 | Clu1061206.con_1 | 1186 | 3665.H20.gz43_521218 |
| 1477 | Clu1062537.con_1 | 286 | 3550.L16.GZ43_506330 |
| 1477 | Clu1062537.con_1 | 449 | 3559.P15.GZ43_507470 |
| 1478 | Clu1064975.con_1 | 325 | 3553.J16.GZ43_506712 |
| 1478 | Clu1064975.con_1 | 713 | 3583.E11.GZ43_510485 |
| 1478 | Clu1064975.con_1 | 265 | 3550.E06.GZ43_506163 |
| 1479 | Clu1065531.con_1 | 337 | 3538.B01.GZ43_504544 |
| 1480 | Clu1066041.con_1 | 508 | 3565.O02.GZ43_508029 |
| 1480 | Clu1066041.con_1 | 842 | 3599.L04.GZ43_512925 |
| 1481 | Clu1069578.con_1 | 1171 | 3664.H15.gz43_520754 |
| 1482 | Clu1069632.con_1 | 550 | 3571.B13.GZ43_508978 |
| 1482 | Clu1069632.con_1 | 551 | 3571.B22.GZ43_509122 |
| 1483 | Clu1073767.con_1 | 193 | 3544.H03.GZ43_505350 |
| 1483 | Clu1073767.con_1 | 1245 | 3754.J24.gz43_533214 |
| 1484 | Clu1074160.con_1 | 296 | 3550.O17.GZ43_506349 |
| 1484 | Clu1074160.con_1 | 672 | 3580.H22.GZ43_510280 |
| 1485 | Clu1076930.con_1 | 635 | 3577.J04.GZ43_509610 |
| 1485 | Clu1076930.con_1 | 983 | 3620.K24.gz43_516155 |
| 1486 | Clu1077033.con_1 | 414 | 3559.A20.GZ43_507535 |
| 1487 | Clu1079196.con_1 | 915 | 3611.B16.gz43_514643 |
| 1487 | Clu1079196.con_1 | 943 | 3614.G20.gz43_515096 |
| 1488 | Clu1079863.con_1 | 170 | 3541.M02.GZ43_504955 |
| 1488 | Clu1079863.con_1 | 547 | 3571.A11.GZ43_508945 |
| 1488 | Clu1079863.con_1 | 931 | 3611.L22.gz43_514749 |
| 1489 | Clu1085638.con_1 | 1232 | 3754.F11.gz43_533002 |
| 1489 | Clu1085638.con_1 | 334 | 3553.K15.GZ43_506697 |
| 1489 | Clu1085638.con_1 | 858 | 3602.C24.GZ43_513620 |
| 1490 | Clu1085645.con_1 | 715 | 3583.E15.GZ43_510549 |
| 1491 | Clu1088847.con_1 | 1116 | 3661.J15.gz43_519604 |
| 1491 | Clu1088847.con_1 | 1204 | 3666.D02.gz43_521310 |
| 1491 | Clu1088847.con_1 | 1059 | 3638.F15.gz43_518310 |
| 1492 | Clu1088930.con_1 | 999 | 3623.N23.gz43_516526 |
| 1493 | Clu1108332.con_2 | 856 | 3602.B21.GZ43_513571 |
| 1494 | Clu1110143.con_1 | 365 | 3553.P18.GZ43_506750 |
| 1494 | Clu1110143.con_1 | 537 | 3568.M03.GZ43_508445 |
| 1495 | Clu1116087.con_1 | 409 | 3556.N21.GZ43_507180 |
| 1495 | Clu1116087.con_1 | 488 | 3565.D14.GZ43_508210 |
| 1495 | Clu1116087.con_1 | 557 | 3571.E16.GZ43_509029 |
| 1496 | Clu1131409.con_1 | 875 | 3602.N03.GZ43_513295 |
| 1496 | Clu1131409.con_1 | 1135 | 3662.L05.gz43_519830 |
| 1497 | Clu1132413.con_1 | 654 | 3580.C05.GZ43_510003 |
| 1497 | Clu1132413.con_1 | 879 | 3605.E19.gz43_513926 |
| 1498 | Clu1136803.con_1 | 171 | 3541.M07.GZ43_505035 |
| 1498 | Clu1136803.con_1 | 219 | 3547.C05.GZ43_505761 |
| 1499 | Clu1138419.con_1 | 250 | 3547.N06.GZ43_505788 |
| 1500 | Clu1138593.con_1 | 198 | 3544.I20.GZ43_505623 |
| 1500 | Clu1138593.con_1 | 374 | 3556.C15.GZ43_507073 |
| 1500 | Clu1138593.con_1 | 377 | 3556.D15.GZ43_507074 |
| 1501 | Clu1139522.con_2 | 650 | 3580.A14.GZ43_510145 |
| 1501 | Clu1139522.con_2 | 1328 | 3762.C20.gz43_534295 |
| 1502 | Clu1139691.con_1 | 199 | 3544.J04.GZ43_505368 |
| 1503 | Clu1142019.con_1 | 1209 | 3666.G12.gz43_521473 |
| 1504 | Clu1171518.con_2 | 494 | 3565.G22.GZ43_508341 |
| 1505 | Clu1176182.con_1 | 566 | 3571.H16.GZ43_509032 |
| 1506 | Clu1182447.con_1 | 1094 | 3646.H16.gz43_519096 |
| 1507 | Clu1183079.con_1 | 923 | 3611.I04.gz43_514458 |
| 1508 | Clu1184134.con_1 | 789 | 3596.D07.GZ43_512581 |
| 1509 | Clu1189027.con_1 | 549 | 3571.A22.GZ43_509121 |
| 1509 | Clu1189027.con_1 | 800 | 3596.I06.GZ43_512570 |
| 1509 | Clu1189027.con_1 | 801 | 3596.I16.GZ43_512730 |
| 1510 | Clu1191547.con_1 | 164 | 3541.I15.GZ43_505159 |
| 1510 | Clu1191547.con_1 | 1323 | 3762.A16.gz43_534229 |
| 1511 | Clu1193236.con_1 | 595 | 3574.D12.GZ43_509348 |
| 1511 | Clu1193236.con_1 | 569 | 3571.J07.GZ43_508890 |
| 1511 | Clu1193236.con_1 | 559 | 3571.F16.GZ43_509030 |
| 1512 | Clu1210953.con_1 | 533 | 3568.J22.GZ43_508746 |
| 1512 | Clu1210953.con_1 | 434 | 3559.K16.GZ43_507481 |
| 1513 | Clu1211899.con_1 | 329 | 3553.K01.GZ43_506473 |
| 1513 | Clu1211899.con_1 | 385 | 3556.H02.GZ43_506870 |
| 1513 | Clu1211899.con_1 | 390 | 3556.J05.GZ43_506920 |
| 1514 | Clu1218793.con_1 | 511 | 3565.O15.GZ43_508237 |
| 1514 | Clu1218793.con_1 | 1242 | 3754.J05.gz43_532910 |
| 1515 | Clu1223271.con_1 | 340 | 3538.C02.GZ43_504561 |
| 1515 | Clu1223271.con_1 | 604 | 3574.H07.GZ43_509272 |
| 1516 | Clu1223477.con_1 | 289 | 3550.M21.GZ43_506411 |
| 1517 | Clu1223907.con_1 | 652 | 3580.C01.GZ43_509939 |
| 1518 | Clu1223938.con_1 | 244 | 3547.L16.GZ43_505946 |
| 1519 | Clu1223948.con_1 | 176 | 3541.P05.GZ43_505006 |
| 1520 | Clu1224039.con_1 | 236 | 3547.I20.GZ43_506007 |
| 1520 | Clu1224039.con_1 | 397 | 3556.K17.GZ43_507113 |
| 1521 | Clu1224226.con_1 | 516 | 3568.A10.GZ43_508545 |
| 1521 | Clu1224226.con_1 | 608 | 3574.J14.GZ43_509386 |
| 1522 | Clu1224379.con_1 | 262 | 3550.D16.GZ43_506322 |
| 1522 | Clu1224379.con_1 | 402 | 3556.M02.GZ43_506875 |
| 1523 | Clu1224422.con_1 | 370 | 3556.B09.GZ43_506976 |
| 1523 | Clu1224422.con_1 | 394 | 3556.K04.GZ43_506905 |
| 1524 | Clu1224547.con_1 | 626 | 3577.E19.GZ43_509845 |
| 1525 | Clu1224704.con_1 | 756 | 3590.E08.GZ43_512214 |
| 1526 | Clu1224752.con_1 | 532 | 3568.J10.GZ43_508554 |
| 1526 | Clu1224752.con_1 | 194 | 3544.H15.GZ43_505542 |
| 1527 | Clu1224881.con_2 | 475 | 3562.N24.GZ43_507996 |
| 1527 | Clu1224881.con_2 | 1111 | 3661.G16.gz43_519617 |
| 1528 | Clu1225500.con_1 | 270 | 3550.G02.GZ43_506101 |
| 1528 | Clu1225500.con_1 | 548 | 3571.A14.GZ43_508993 |
| 1528 | Clu1225500.con_1 | 1066 | 3643.E24.gz43_518837 |
| 1529 | Clu1225595.con_1 | 455 | 3562.C23.GZ43_507969 |
| 1530 | Clu1225719.con_2 | 297 | 3550.O18.GZ43_506365 |
| 1530 | Clu1225719.con_2 | 1327 | 3762.B15.gz43_534214 |
| 1531 | Clu1225734.con_1 | 907 | 3608.L14.gz43_514237 |
| 1532 | Clu1226064.con_1 | 227 | 3547.F20.GZ43_506004 |
| 1533 | Clu1226304.con_1 | 783 | 3590.N21.GZ43_512431 |
| 1534 | Clu1226413.con_1 | 611 | 3574.K20.GZ43_509483 |
| 1534 | Clu1226413.con_1 | 480 | 3562.P23.GZ43_507982 |
| 1535 | Clu1226932.con_1 | 345 | 3538.F02.GZ43_504564 |
| 1535 | Clu1226932.con_1 | 1255 | 3754.P13.gz43_533044 |
| 1536 | Clu1227623.con_1 | 834 | 3599.F17.GZ43_513127 |
| 1536 | Clu1227623.con_1 | 967 | 3617.N19.gz43_515471 |
| 1537 | Clu1227781.con_1 | 349 | 3553.L02.GZ43_506490 |
| 1537 | Clu1227781.con_1 | 1014 | 3626.P14.gz43_516768 |
| 1538 | Clu1227862.con_2 | 656 | 3580.D22.GZ43_510276 |
| 1538 | Clu1227862.con_2 | 661 | 3580.E21.GZ43_510261 |
| 1539 | Clu1227912.con_1 | 1241 | 3754.J01.gz43_532846 |
| 1539 | Clu1227912.con_1 | 426 | 3559.F07.GZ43_507332 |
| 1539 | Clu1227912.con_1 | 423 | 3559.E06.GZ43_507315 |
| 1540 | Clu1227968.con_1 | 1168 | 3664.E24.gz43_520895 |
| 1540 | Clu1227968.con_1 | 361 | 3553.O23.GZ43_506829 |
| 1541 | Clu1228277.con_1 | 854 | 3602.A09.GZ43_513378 |
| 1542 | Clu1230257.con_1 | 1068 | 3643.G20.gz43_518775 |
| 1542 | Clu1230257.con_1 | 1086 | 3646.A13.gz43_519041 |
| 1543 | Clu1245188.con_1 | 400 | 3556.L16.GZ43_507098 |
| 1543 | Clu1245188.con_1 | 1142 | 3663.E04.gz43_520191 |
| 1544 | Clu1250373.con_1 | 422 | 3559.D21.GZ43_507554 |
| 1544 | Clu1250373.con_1 | 1141 | 3663.C19.gz43_520429 |
| 1544 | Clu1250373.con_1 | 1203 | 3666.C18.gz43_521565 |
| 1545 | Clu1256564.con_2 | 541 | 3568.P04.GZ43_508464 |
| 1545 | Clu1256564.con_2 | 1178 | 3664.O22.gz43_520873 |
| 1546 | Clu1259069.con_2 | 1349 | 3762.L20.gz43_534304 |
| 1547 | Clu1274736.con_1 | 1198 | 3665.P13.gz43_521114 |
| 1547 | Clu1274736.con_1 | 1216 | 3666.N06.gz43_521384 |
| 1548 | Clu1283437.con_2 | 213 | 3544.O15.GZ43_505549 |
| 1548 | Clu1283437.con_2 | 981 | 3620.J18.gz43_516058 |
| 1549 | Clu1292262.con_1 | 883 | 3605.I19.gz43_513930 |
| 1549 | Clu1292262.con_1 | 968 | 3617.P11.gz43_515345 |
| 1549 | Clu1292262.con_1 | 1117 | 3661.K22.gz43_519717 |
| 1550 | Clu1292281.con_1 | 881 | 3605.H10.gz43_513785 |
| 1550 | Clu1292281.con_1 | 1189 | 3665.M21.gz43_521239 |
| 1551 | Clu1292289.con_1 | 938 | 3614.C18.gz43_515060 |
| 1551 | Clu1292289.con_1 | 1098 | 3646.K14.gz43_519067 |
| 1552 | Clu1292413.con_1 | 1016 | 3629.B14.gz43_517138 |
| 1552 | Clu1292413.con_1 | 1215 | 3666.M16.gz43_521543 |
| 1552 | Clu1292413.con_1 | 976 | 3620.E19.gz43_516069 |
| 1553 | Clu1292423.con_1 | 939 | 3614.D14.gz43_514997 |
| 1553 | Clu1292423.con_1 | 965 | 3617.N10.gz43_515327 |
| 1554 | Clu1292436.con_1 | 958 | 3617.H16.gz43_515417 |
| 1554 | Clu1292436.con_1 | 1074 | 3643.I24.gz43_518841 |
| 1555 | Clu1292439.con_1 | 946 | 3614.J07.gz43_514891 |
| 1555 | Clu1292439.con_1 | 1172 | 3664.H22.gz43_520866 |
| 1556 | Clu1292582.con_1 | 1199 | 3666.A07.gz43_521387 |
| 1556 | Clu1292582.con_1 | 1040 | 3635.A06.gz43_517777 |
| 1557 | Clu1292600.con_1 | 1115 | 3661.I22.gz43_519715 |
| 1557 | Clu1292600.con_1 | 919 | 3611.E20.gz43_514710 |
| 1557 | Clu1292600.con_1 | 1064 | 3638.N05.gz43_518158 |
| 1558 | Clu1292932.con_1 | 1154 | 3663.M24.gz43_520519 |
| 1558 | Clu1292932.con_1 | 1170 | 3664.G20.gz43_520833 |
| 1559 | Clu1292996.con_1 | 1018 | 3629.E01.gz43_516933 |
| 1559 | Clu1292996.con_1 | 1036 | 3632.N13.gz43_517518 |
| 1559 | Clu1292996.con_1 | 1161 | 3664.A11.gz43_520683 |
| 1560 | Clu1293946.con_1 | 1177 | 3664.L21.gz43_520854 |
| 1560 | Clu1293946.con_1 | 1205 | 3666.D11.gz43_521454 |
| 1561 | Clu1293972.con_1 | 1099 | 3646.L17.gz43_519116 |
| 1561 | Clu1293972.con_1 | 954 | 3614.P16.gz43_515041 |
| 1561 | Clu1293972.con_1 | 1010 | 3626.N07.gz43_516654 |

### Example 19

### Additional Gene Characterization

[0398] Sequences of the polynucleotides of SEQ ID NOS: 134-1352 were used as a query sequence in a TeraBLASTN search of the DoubleTwist Human Genome Sequence Database (DoubleTwist, Inc., Oakland, Calif.), which contains all the human genomic sequences that have been assembled into a contiguous model of the human genome. Predicted cDNA and protein sequences were obtained where a polynucleotide of the invention was homologous to a predicted full-length gene sequence. Alternatively, a sequence of a contig or consensus sequence described herein could be used directly as a query sequence in a TeraBLASTN search of the DoubleTwist Human Genome Sequence Database.

[0399] The final results of the search provided the predicted cDNA sequences listed as SEQ ID NOS: 1562-1618 in the accompanying Sequence Listing and summarized in Table 14 (inserted prior to claims), and the predicted protein sequences listed as SEQ ID SEQ ID NOS:1619-1675 in the accompanying Sequence Listing and summarized in Table 15 (inserted prior to claims). Specifically, Table 14 provides: 1) the SEQ ID NO (“SEQ ID”) assigned to each cDNA sequence for use in the present specification; 2) the cDNA sequence name (“cDNA SEQ NAME”) used as an internal identifier of the sequence; 3) the chromosome (“CHROM”) containing the gene corresponding to the cDNA sequence; and 4) the exon (“EXON”) of the gene corresponding to the cDNA sequence to which the polynucleotide of SEQ ID NOS: 134-1352 maps. Table 15 provides: 1) the SEQ ID NO (“SEQ ID”) assigned to each protein sequence for use in the present specification; 2) the protein sequence name (“PROTEIN SEQ NAME”) used as an internal identifier of the sequence; 3) the chromosome (“CHROM”) containing the gene corresponding to the cDNA sequence; and 4) the exon (“EXON”) of the gene corresponding to the cDNA and protein sequence to which the polynucleotide of SEQ ID NOS: 134-1352 maps.

TABLE 14

| SEQ ID | cDNA SEQ NAME | CHROM | EXON |
|---|---|---|---|
| 1562 | NTN_004511S11.3_4 | Chr(1) | Exons(14) |
| 1563 | NTN_004754S1.3_4 | Chr(1) | Exons(5) |
| 1564 | NTN_005530S2.3_3 | Chr(3) | Exons(5) |
| 1565 | NTN_005530S2.3_4 | Chr(3) | Exons(6) |
| 1566 | NTN_005564S1.3_3 | Chr(3) | Exons(2) |
| 1567 | NTN_005635S2.3_1 | Chr(3) | Exons(10) |
| 1568 | NTN_005962S3.3_4 | Chr(3) | Exons(9) |
| 1569 | NTN_006051S4.3_2 | Chr(4) | Exons(17) |
| 1570 | NTN_006051S5.3_5 | Chr(4) | Exons(6) |
| 1571 | NTN_007011S7.3_9 | Chr(5) | Exons(16) |
| 1572 | NTN_007122S8.3_8 | Chr(6) | Exons(12) |
| 1573 | NTN_007592S2.3_10 | Chr(6) | Exons(3) |
| 1574 | NTN_007592S3.3_5 | Chr(6) | Exons(1) |
| 1575 | NTN_007844S7.3_3 | Chr(7) | Exons(3) |
| 1576 | NTN_007867S7.3_3 | Chr(7) | Exons(15) |
| 1577 | NTN_007867S8.3_1 | Chr(7) | Exons(14) |
| 1578 | NTN_008059S2.3_3 | Chr(8) | Exons(8) |
| 1579 | NTN_008338S4.3_6 | Chr(9) | Exons(4) |
| 1580 | NTN_008470S7.3_1 | Chr(9) | Exons(13) |
| 1581 | NTN_008627S7.3_5 | Chr(10) | Exons(13) |
| 1582 | NTN_008769S8.3_1 | Chr(10) | Exons(7) |
| 1583 | NTN_008858S2.3_2 | Chr(10) | Exons(5) |
| 1584 | NTN_009296S1.3_1 | Chr(11) | Exons(6) |
| 1585 | NTN_009296S3.3_2 | Chr(11) | Exons(3) |
| 1586 | NTN_009526S2.3_3 | Chr(12) | Exons(11) |
| 1587 | NTN_009526S2.3_5 | Chr(12) | Exons(11) |
| 1588 | NTN_009848S8.3_5 | Chr(13) | Exons(3) |
| 1589 | NTN_009866S24.3_5 | Chr(13) | Exons(5) |
| 1590 | NTN_010018S2.3_5 | Chr(14) | Exons(12) |
| 1591 | NTN_010164S3.3_8 | Chr(14) | Exons(3) |
| 1592 | NTN_010289S6.3_5 | Chr(15) | Exons(2) |
| 1593 | NTN_010663S1.3_1 | Chr(17) | Exons(4) |
| 1594 | NTN_010757S4.3_2 | Chr(17) | Exons(25) |
| 1595 | NTN_011059S6.3_4 | Chr(18) | Exons(2) |
| 1596 | NTN_011130S2.3_3 | Chr(19) | Exons(6) |
| 1597 | NTN_011266S2.2_3 | Chr(19) | Exons(1) |
| 1598 | NTN_011361S6.3_7 | Chr(20) | Exons(6) |
| 1599 | NTN_011430S6.3_6 | Chr(20) | Exons(22) |
| 1600 | NTN_011512S51.3_3 | Chr(21) | Exons(11) |
| 1601 | NTN_017582S2.3_6 | Chr(9) | Exons(2) |
| 1602 | NTN_019508S1.3_6 | Chr(10) | Exons(8) |
| 1603 | NTN_019721S6.3_1 | Chr(Y) | Exons(5) |
| 1604 | NTN_022448S1.3_2 | Chr(3) | Exons(11) |
| 1605 | NTN_022456S1.3_2 | Chr(3) | Exons(6) |
| 1606 | NTN_022526S1.3_2 | Chr(3) | Exons(10) |
| 1607 | NTN_022807S2.3_1 | Chr(4) | Exons(2) |
| 1608 | NTN_022948S1.3_1 | Chr(4) | Exons(4) |
| 1609 | NTN_022948S1.3_5 | Chr(4) | Exons(4) |
| 1610 | NTN_023142S2.3_4 | Chr(5) | Exons(2) |
| 1611 | NTN_023860S1.3_1 | Chr(8) | Exons(3) |
| 1612 | NTN_024001S1.3_4 | Chr(9) | Exons(6) |
| 1613 | NTN_024871S1.3_7 | Chr(17) | Exons(4) |
| 1614 | NTN_024882S1.3_3 | Chr(17) | Exons(8) |
| 1615 | NTN_025842S13.2_1 | Chr(11) | Exons(10) |
| 1616 | NTN_025864S1.1_1 | Chr(12) | Exons(3) |
| 1617 | NTN_025907S4.2_3 | Chr(17) | Exons(5) |
| 1618 | NTN_026331S1.1_1 | Chr(7) | Exons(14) |

[0400] TABLE 15

| SEQ ID | PROTEIN SEQ NAME | CHROM | EXON |
|---|---|---|---|
| 1619 | NTP_004511S11.3_4 | Chr(1) | Exons(14) |
| 1620 | NTP_004754S1.3_4 | Chr(1) | Exons(5) |
| 1621 | NTP_005530S2.3_3 | Chr(3) | Exons(5) |
| 1622 | NTP_005530S2.3_4 | Chr(3) | Exons(6) |
| 1623 | NTP_005564S1.3_3 | Chr(3) | Exons(2) |
| 1624 | NTP_005635S2.3_1 | Chr(3) | Exons(10) |
| 1625 | NTP_005962S3.3_4 | Chr(3) | Exons(9) |
| 1626 | NTP_006051S4.3_2 | Chr(4) | Exons(17) |
| 1627 | NTP_006051S5.3_5 | Chr(4) | Exons(6) |
| 1628 | NTP_007011S7.3_9 | Chr(5) | Exons(16) |
| 1629 | NTP_007122S8.3_8 | Chr(6) | Exons(12) |
| 1630 | NTP_007592S2.3_10 | Chr(6) | Exons(3) |
| 1631 | NTP_007592S3.3_5 | Chr(6) | Exons(1) |
| 1632 | NTP_007844S7.3_3 | Chr(7) | Exons(3) |
| 1633 | NTP_007867S7.3_3 | Chr(7) | Exons(15) |
| 1634 | NTP_007867S8.3_1 | Chr(7) | Exons(14) |
| 1635 | NTP_008059S2.3_3 | Chr(8) | Exons(8) |
| 1636 | NTP_008338S4.3_6 | Chr(9) | Exons(4) |
| 1637 | NTP_008470S7.3_1 | Chr(9) | Exons(13) |
| 1638 | NTP_008627S7.3_5 | Chr(10) | Exons(13) |
| 1639 | NTP_008769S8.3_1 | Chr(10) | Exons(7) |
| 1640 | NTP_008858S2.3_2 | Chr(10) | Exons(5) |
| 1641 | NTP_009296S1.3_1 | Chr(11) | Exons(6) |
| 1642 | NTP_009296S3.3_2 | Chr(11) | Exons(3) |
| 1643 | NTP_009526S2.3_3 | Chr(12) | Exons(11) |
| 1644 | NTP_009526S2.3_5 | Chr(12) | Exons(11) |
| 1645 | NTP_009848S8.3_5 | Chr(13) | Exons(3) |
| 1646 | NTP_009866S24.3_5 | Chr(13) | Exons(5) |
| 1647 | NTP_010018S2.3_5 | Chr(14) | Exons(12) |
| 1648 | NTP_010164S3.3_8 | Chr(14) | Exons(3) |
| 1649 | NTP_010289S6.3_5 | Chr(15) | Exons(2) |
| 1650 | NTP_010663S1.3_1 | Chr(17) | Exons(4) |
| 1651 | NTP_010757S4.3_2 | Chr(17) | Exons(25) |
| 1652 | NTP_011059S6.3_4 | Chr(18) | Exons(2) |
| 1653 | NTP_011130S2.3_3 | Chr(19) | Exons(6) |
| 1654 | NTP_011266S2.2_3 | Chr(19) | Exons(1) |
| 1655 | NTP_011361S6.3_7 | Chr(20) | Exons(6) |
| 1656 | NTP_011430S6.3_6 | Chr(20) | Exons(22) |
| 1657 | NTP_011512S51.3_3 | Chr(21) | Exons(11) |
| 1658 | NTP_017582S2.3_6 | Chr(9) | Exons(2) |
| 1659 | NTP_019508S1.3_6 | Chr(10) | Exons(8) |
| 1660 | NTP_019721S6.3_1 | Chr(Y) | Exons(5) |
| 1661 | NTP_022448S1.3_2 | Chr(3) | Exons(11) |
| 1662 | NTP_022456S1.3_2 | Chr(3) | Exons(6) |
| 1663 | NTP_022526S1.3_2 | Chr(3) | Exons(10) |
| 1664 | NTP_022807S2.3_1 | Chr(4) | Exons(2) |
| 1665 | NTP_022948S1.3_1 | Chr(4) | Exons(4) |
| 1666 | NTP_022948S1.3_5 | Chr(4) | Exons(4) |
| 1667 | NTP_023142S2.3_4 | Chr(5) | Exons(2) |
| 1668 | NTP_023860S1.3_1 | Chr(8) | Exons(3) |
| 1669 | NTP_024001S1.3_4 | Chr(9) | Exons(6) |
| 1670 | NTP_024871S1.3_7 | Chr(17) | Exons(4) |
| 1671 | NTP_024882S1.3_3 | Chr(17) | Exons(8) |
| 1672 | NTP_025842S13.2_1 | Chr(11) | Exons(10) |
| 1673 | NTP_025864S1.1_1 | Chr(12) | Exons(3) |
| 1674 | NTP_025907S4.2_3 | Chr(17) | Exons(5) |
| 1675 | NTP_026331S1.1_1 | Chr(7) | Exons(14) |

[0401] A correlation between the polynucleotide used as a query sequence as described above and the corresponding predicted cDNA and protein sequences is contained in Table 16. Specifically Table 16 provides: 1) the SEQ ID NO of the cDNA (“cDNA SEQ ID”); 2) the cDNA sequence name (“cDNA SEQ NAME”) used as an internal identifier of sequence; 3) the SEQ ID NO of the protein (“PROTEIN SEQ ID”) encoded by the cDNA sequence 4) the sequence name of the protein (“PROTEIN SEQ NAME”) encoded by the cDNA sequence; 5) the SEQ ID NO of the polynucleotide (“POLYNTD SEQ ID”) of SEQ ID NOS: 134-1352 that maps to the cDNA and protein; and 6) the sequence name (“POLYNTD SEQ NAME”) of the polynucleotide of SEQ ID NOS: 134-1352 that maps to the DNA and protein.

TABLE 16

| cDNA | | | | | |
|---|---|---|---|---|---|
| SEQ | | PROTEIN | PROTEIN SEQ | POLYNTD | POLYNTD SEQ |
| ID | cDNA SEQ NAME | SEQ ID | NAME | SEQ ID | NAME |
| 1562 | NTN_004511S11.3_4 | 1619 | NTP_004511S11.3_4 | 182 | 3544.B02.GZ43_505328 |
| 1563 | NTN_004754S1.3_4 | 1620 | NTP_004754S1.3_4 | 896 | 3608.E20.gz43_514326 |
| 1564 | NTN_005530S2.3_3 | 1621 | NTP_005530S2.3_3 | 662 | 3580.E23.GZ43_510293 |
| 1565 | NTN_005530S2.3_4 | 1622 | NTP_005530S2.3_4 | 662 | 3580.E23.GZ43_510293 |
| 1566 | NTN_005564S1.3_3 | 1623 | NTP_005564S1.3_3 | 383 | 3556.G15.GZ43_507077 |
| 1566 | NTN_005564S1.3_3 | 1623 | NTP_005564S1.3_3 | 283 | 3550.K05.GZ43_506153 |
| 1566 | NTN_005564S1.3_3 | 1623 | NTP_005564S1.3_3 | 519 | 3568.C22.GZ43_508739 |
| 1567 | NTN_005635S2.3_1 | 1624 | NTP_005635S2.3_1 | 551 | 3571.B22.GZ43_509122 |
| 1567 | NTN_005635S2.3_1 | 1624 | NTP_005635S2.3_1 | 550 | 3571.B13.GZ43_508978 |
| 1568 | NTN_005962S3.3_4 | 1625 | NTP_005962S3.3_4 | 386 | 3556.H12.GZ43_507030 |
| 1569 | NTN_006051S4.3_2 | 1626 | NTP_006051S4.3_2 | 448 | 3559.P10.GZ43_507390 |
| 1570 | NTN_006051S5.3_5 | 1627 | NTP_006051S5.3_5 | 448 | 3559.P10.GZ43_507390 |
| 1571 | NTN_007011S7.3_9 | 1628 | NTP_007011S7.3_9 | 983 | 3620.K24.gz43_516155 |
| 1571 | NTN_007011S7.3_9 | 1628 | NTP_007011S7.3_9 | 635 | 3577.J04.GZ43_509610 |
| 1572 | NTN_007122S8.3_8 | 1629 | NTP_007122S8.3_8 | 1337 | 3762.E15.gz43_534217 |
| 1572 | NTN_007122S8.3_8 | 1629 | NTP_007122S8.3_8 | 1337 | 3762.E15.gz43_534217 |
| 1573 | NTN_007592S2.3_10 | 1630 | NTP_007592S2.3_10 | 1005 | 3626.G01.gz43_516551 |
| 1574 | NTN_007592S3.3_5 | 1631 | NTP_007592S3.3_5 | 1057 | 3638.A02.gz43_518097 |
| 1575 | NTN_007844S7.3_3 | 1632 | NTP_007844S7.3_3 | 1038 | 3632.O06.gz43_517407 |
| 1576 | NTN_007867S7.3_3 | 1633 | NTP_007867S7.3_3 | 566 | 3571.H16.GZ43_509032 |
| 1577 | NTN_007867S8.3_1 | 1634 | NTP_007867S8.3_1 | 566 | 3571.H16.GZ43_509032 |
| 1578 | NTN_008059S2.3_3 | 1635 | NTP_008059S2.3_3 | 766 | 3590.H16.GZ43_512345 |
| 1579 | NTN_008338S4.3_6 | 1636 | NTP_008338S4.3_6 | 1014 | 3626.P14.gz43_516768 |
| 1579 | NTN_008338S4.3_6 | 1636 | NTP_008338S4.3_6 | 349 | 3553.L02.GZ43_506490 |
| 1580 | NTN_008470S7.3_1 | 1637 | NTP_008470S7.3_1 | 1233 | 3754.F15.gz43_533066 |
| 1581 | NTN_008627S7.3_5 | 1638 | NTP_008627S7.3_5 | 956 | 3617.C21.gz43_515492 |
| 1582 | NTN_008769S8.3_1 | 1639 | NTP_008769S8.3_1 | 207 | 3544.M10.GZ43_505467 |
| 1582 | NTN_008769S8.3_1 | 1639 | NTP_008769S8.3_1 | 207 | 3544.M10.GZ43_505467 |
| 1583 | NTN_008858S2.3_2 | 1640 | NTP_008858S2.3_2 | 844 | 3599.M04.GZ43_512926 |
| 1584 | NTN_009296S1.3_1 | 1641 | NTP_009296S1.3_1 | 955 | 3617.B16.gz43_515411 |
| 1585 | NTN_009296S3.3_2 | 1642 | NTP_009296S3.3_2 | 883 | 3605.I19.gz43_513930 |
| 1585 | NTN_009296S3.3_2 | 1642 | NTP_009296S3.3_2 | 1117 | 3661.K22.gz43_519717 |
| 1585 | NTN_009296S3.3_2 | 1642 | NTP_009296S3.3_2 | 968 | 3617.P11.gz43_515345 |
| 1586 | NTN_009526S2.3_3 | 1643 | NTP_009526S2.3_3 | 166 | 3541.I18.GZ43_505207 |
| 1586 | NTN_009526S2.3_3 | 1643 | NTP_009526S2.3_3 | 555 | 3571.E02.GZ43_508805 |
| 1586 | NTN_009526S2.3_3 | 1643 | NTP_009526S2.3_3 | 889 | 3605.N12.gz43_513823 |
| 1587 | NTN_009526S2.3_5 | 1644 | NTP_009526S2.3_5 | 555 | 3571.E02.GZ43_508805 |
| 1587 | NTN_009526S2.3_5 | 1644 | NTP_009526S2.3_5 | 166 | 3541.I18.GZ43_505207 |
| 1587 | NTN_009526S2.3_5 | 1644 | NTP_009526S2.3_5 | 889 | 3605.N12.gz43_513823 |
| 1588 | NTN_009848S8.3_5 | 1645 | NTP_009848S8.3_5 | 753 | 3590.D03.GZ43_512133 |
| 1589 | NTN_009866S24.3_5 | 1646 | NTP_009866S24.3_5 | 626 | 3577.E19.GZ43_509845 |
| 1590 | NTN_010018S2.3_5 | 1647 | NTP_010018S2.3_5 | 703 | 3580.P04.GZ43_510000 |
| 1591 | NTN_010164S3.3_8 | 1648 | NTP_010164S3.3_8 | 727 | 3583.K08.GZ43_510443 |
| 1592 | NTN_010289S6.3_5 | 1649 | NTP_010289S6.3_5 | 742 | 3583.O03.GZ43_510367 |
| 1593 | NTN_010663S1.3_1 | 1650 | NTP_010663S1.3_1 | 506 | 3565.N13.GZ43_508204 |
| 1594 | NTN_010757S4.3_2 | 1651 | NTP_010757S4.3_2 | 780 | 3590.M09.GZ43_512238 |
| 1595 | NTN_011059S6.3_4 | 1652 | NTP_011059S6.3_4 | 425 | 3559.E20.GZ43_507539 |
| 1596 | NTN_011130S2.3_3 | 1653 | NTP_011130S2.3_3 | 1226 | 3754.C22.gz43_533175 |
| 1596 | NTN_011130S2.3_3 | 1653 | NTP_011130S2.3_3 | 1226 | 3754.C22.gz43_533175 |
| 1597 | NTN_011266S2.2_3 | 1654 | NTP_011266S2.2_3 | 1209 | 3666.G12.gz43_521473 |
| 1598 | NTN_011361S6.3_7 | 1655 | NTP_011361S6.3_7 | 428 | 3559.H09.GZ43_507366 |
| 1599 | NTN_011430S6.3_6 | 1656 | NTP_011430S6.3_6 | 1195 | 3665.O19.gz43_521209 |
| 1600 | NTN_011512S51.3_3 | 1657 | NTP_011512S51.3_3 | 333 | 3553.K07.GZ43_506569 |
| 1601 | NTN_017582S2.3_6 | 1658 | NTP_017582S2.3_6 | 948 | 3614.L13.gz43_514989 |
| 1602 | NTN_019508S1.3_6 | 1659 | NTP_019508S1.3_6 | 956 | 3617.C21.gz43_515492 |
| 1603 | NTN_019721S6.3_1 | 1660 | NTP_019721S6.3_1 | 139 | 3541.A23.GZ43_505279 |
| 1604 | NTN_022448S1.3_2 | 1661 | NTP_022448S1.3_2 | 943 | 3614.G20.gz43_515096 |
| 1604 | NTN_022448S1.3_2 | 1661 | NTP_022448S1.3_2 | 915 | 3611.B16.gz43_514643 |
| 1604 | NTN_022448S1.3_2 | 1661 | NTP_022448S1.3_2 | 1087 | 3646.B20.gz43_519154 |
| 1605 | NTN_022456S1.3_2 | 1662 | NTP_022456S1.3_2 | 949 | 3614.M08.gz43_514910 |
| 1606 | NTN_022526S1.3_2 | 1663 | NTP_022526S1.3_2 | 1018 | 3629.E01.gz43_516933 |
| 1606 | NTN_022526S1.3_2 | 1663 | NTP_022526S1.3_2 | 1161 | 3664.A11.gz43_520683 |
| 1606 | NTN_022526S1.3_2 | 1663 | NTP_022526S1.3_2 | 1036 | 3632.N13.gz43_517518 |
| 1607 | NTN_022807S2.3_1 | 1664 | NTP_022807S2.3_1 | 1080 | 3643.O21.gz43_518799 |
| 1608 | NTN_022948S1.3_1 | 1665 | NTP_022948S1.3_1 | 1025 | 3629.J03.gz43_516970 |
| 1608 | NTN_022948S1.3_1 | 1665 | NTP_022948S1.3_1 | 1197 | 3665.O23.gz43_521273 |
| 1608 | NTN_022948S1.3_1 | 1665 | NTP_022948S1.3_1 | 1205 | 3666.D11.gz43_521454 |
| 1608 | NTN_022948S1.3_1 | 1665 | NTP_022948S1.3_1 | 965 | 3617.N10.gz43_515327 |
| 1608 | NTN_022948S1.3_1 | 1665 | NTP_022948S1.3_1 | 1105 | 3661.A08.gz43_519483 |
| 1608 | NTN_022948S1.3_1 | 1665 | NTP_022948S1.3_1 | 1177 | 3664.L21.gz43_520854 |
| 1608 | NTN_022948S1.3_1 | 1665 | NTP_022948S1.3_1 | 939 | 3614.D14.gz43_514997 |
| 1608 | NTN_022948S1.3_1 | 1665 | NTP_022948S1.3_1 | 1098 | 3646.K14.gz43_519067 |
| 1608 | NTN_022948S1.3_1 | 1665 | NTP_022948S1.3_1 | 938 | 3614.C18.gz43_515060 |
| 1609 | NTN_022948S1.3_5 | 1666 | NTP_022948S1.3_5 | 939 | 3614.D14.gz43_514997 |
| 1609 | NTN_022948S1.3_5 | 1666 | NTP_022948S1.3_5 | 1310 | 3759.L10.gz43_533760 |
| 1609 | NTN_022948S1.3_5 | 1666 | NTP_022948S1.3_5 | 965 | 3617.N10.gz43_515327 |
| 1610 | NTN_023142S2.3_4 | 1667 | NTP_023142S2.3_4 | 410 | 3556.O08.GZ43_506973 |
| 1611 | NTN_023860S1.3_1 | 1668 | NTP_023860S1.3_1 | 1180 | 3664.P18.gz43_520810 |
| 1612 | NTN_024001S1.3_4 | 1669 | NTP_024001S1.3_4 | 370 | 3556.B09.GZ43_506976 |
| 1612 | NTN_024001S1.3_4 | 1669 | NTP_024001S1.3_4 | 394 | 3556.K04.GZ43_506905 |
| 1613 | NTN_024871S1.3_7 | 1670 | NTP_024871S1.3_7 | 700 | 3580.O06.GZ43_510031 |
| 1614 | NTN_024882S1.3_3 | 1671 | NTP_024882S1.3_3 | 602 | 3574.G07.GZ43_509271 |
| 1615 | NTN_025842S13.2_1 | 1672 | NTP_025842S13.2_1 | 999 | 3623.N23.gz43_516526 |
| 1616 | NTN_025864S1.1_1 | 1673 | NTP_025864S1.1_1 | 1067 | 3643.F07.gz43_518566 |
| 1616 | NTN_025864S1.1_1 | 1673 | NTP_025864S1.1_1 | 1067 | 3643.F07.gz43_518566 |
| 1616 | NTN_025864S1.1_1 | 1673 | NTP_025864S1.1_1 | 1334 | 3762.D22.gz43_534328 |
| 1617 | NTN_025907S4.2_3 | 1674 | NTP_025907S4.2_3 | 1192 | 3665.O06.gz43_521001 |
| 1618 | NTN_026331S1.1_1 | 1675 | NTP_026331S1.1_1 | 566 | 3571.H16.GZ43_509032 |

[0402] Through contig and consensus sequence assembly and the use of homology searching software programs, the sequence information provided herein can be readily extended to confirm, or confirm a predicted, gene having the sequence of the polynucleotides described in the present invention. Further the information obtained can be used to identify the function of the gene product of the gene corresponding to the polynucleotides described herein. While not necessary to the practice of the invention, identification of the function of the corresponding gene, can provide guidance in the design of therapeutics that target the gene to modulate its activity and modulate the cancerous phenotype (e.g., inhibit metastasis, proliferation, and the like).

### Example 20

### Results of Public Database Search to Identify Function of Gene Products

[0403] SEQ ID NOS:134-1618 were translated in all three reading frames, and the nucleotide sequences and translated amino acid sequences used as query sequences to search for homologous sequences in the GenBank (nucleotide sequences) database. Query and individual sequences were aligned using the TeraBLAST program available from TimeLogic, Crystal Bay, Nev. The sequences were masked to various extents to prevent searching of repetitive sequences or poly-A sequences, using the RepeatMasker masking program for masking low complexity as described above.

[0404] Table 17 (inserted prior to claims) provides the alignment summaries having a p value of 1×10e-2 or less indicating substantial homology between the sequences of the present invention and those of the indicated public databases. Specifically, Table 17 provides: 1) the SEQ ID NO (“SEQ ID”) of the query sequence; 2) the sequence name (“SEQ NAME”) used as an internal identifier of the query sequence; 3) the accession number (“ACCESSION”) of the GenBank database entry of the homologous sequence; 4) a description of the GenBank sequences (“GENBANK DESCRIPTION”); and 5) the score of the similarity of the polynucleotide sequence and the GenBank sequence (“GENBANK SCORE”). The alignments provided in Table 8 are the best available alignment to a DNA sequence at a time just prior to filing of the present specification. Incorporated by reference is all publicly available information regarding the sequence listed in Table 17 and their related sequences. The search program and database used for the alignment, as well as the calculation of the p value are also indicated. Full length sequences or fragments of the polynucleotide sequences can be used as probes and primers to identify and isolate the full length sequence of the corresponding polynucleotide.

TABLE 17

| SEQ | | | | GENBANK |
|---|---|---|---|---|
| ID | SEQ NAME | ACCESSION | GENBANK DESCRIPTION | SCORE |
| 134 | 3538.O24.GZ43_504925 | AF047717 | Streptomyces chrysomallus actinomycin | 1.17E−04 |
| | | | synthetase II (acmB) gene, complete cds | |
| 135 | 3538.P11.GZ43_504718 | AF111848 | Homo sapiens PRO0529 mRNA, | 2.00E−06 |
| | | | complete cds | |
| 136 | 3541.A04.GZ43_504975 | X58178 | S. pyogenes for emm41 gene | 5.00E−06 |
| 137 | 3541.A05.GZ43_504991 | AF190638 | Mus musculus nephrin NPHS1 (Nphs1) | 2.00E−06 |
| | | | gene, partial cds | |
| 138 | 3541.A16.GZ43_505167 | AB024689 | Mus musculus gene, exon 3, partial | 6.00E−06 |
| | | | sequence | |
| 139 | 3541.A23.GZ43_505279 | M14155 | Human insulin-like growth factor (IGF-I) | 3.00E−06 |
| | | | IB gene, exon 4 | |
| 140 | 3541.B04.GZ43_504976 | U32801 | Haemophilus influenzae Rd section 116 | 1.10E−05 |
| | | | of 163 of the complete genome | |
| 141 | 3541.B17.GZ43_505184 | X89398 | H. sapiens ung gene for uracil DNA- | 1.21E−04 |
| | | | glycosylase | |
| 142 | 3538.G08.GZ43_504661 | AF270390 | Staphylococcus epidermidis strain SR1 | 3.00E−06 |
| | | | clone step.4045d08 genomic sequence | |
| 143 | 3538.G17.GZ43_504805 | AC006623 | Caenorhabditis elegans clone C52E2, | 4.00E−06 |
| | | | complete sequence | |
| 144 | 3538.G19.GZ43_504837 | AB042425 | Homo sapiens Pim-2h, hUGT2, hUGT1, | 6.60E−11 |
| | | | genes for pim-2 protooncogene homolog, | |
| | | | UDP-galactose transporter 1, UDP- | |
| | | | galactose transporter 2, complete cds | |
| 145 | 3538.G22.GZ43_504885 | L08338 | Human immunodeficiency virus type 1 | 3.10E−07 |
| | | | proviral envelope glycoprotein gene V3 | |
| | | | region from A196/4537, clone 6 (from | |
| | | | adult) | |
| 146 | 3538.H05.GZ43_504614 | AE006731 | Sulfolobus solfataricus section 90 of 272 | 2.00E−06 |
| | | | of the complete genome | |
| 147 | 3538.H21.GZ43_504870 | AL121807 | S. pombe chromosome III cosmid c132 | 1.30E−05 |
| 148 | 3538.I08.GZ43_504663 | AF186379 | Homo sapiens ligand effect modulator-6 | 8.00E−10 |
| | | | (LEM6) mRNA, complete cds | |
| 149 | 3538.I13.GZ43_504743 | AC007658 | Arabidopsis thaliana chromosome II | 3.30E−08 |
| | | | section 216 of 255 of the complete | |
| | | | sequence. Sequence from clones F27I1 | |
| 150 | 3538.J22.GZ43_504888 | X04616 | Anacystis nidulans R2 psbAI gene for | 8.90E−07 |
| | | | photosystem II Q(B) protein | |
| 151 | 3538.K12.GZ43_504729 | X91656 | M. musculus Srp20 gene | 4.40E−05 |
| 152 | 3538.K23.GZ43_504905 | M62849 | Human papillomavirus ORFs | 4.40E−07 |
| 153 | 3538.L16.GZ43_504794 | AE001382 | Plasmodium falciparum chromosome 2, | 7.00E−06 |
| | | | section 19 of 73 of the complete | |
| | | | sequence | |
| 154 | 3538.M02.GZ43_504571 | U07976 | Human T cell receptor beta | 7.00E−06 |
| | | | (TCRBV7S2, TCRBV13S2-1, | |
| | | | TCRBV6S7-1) genes, TCRBV deleted 2 | |
| | | | haplotype, partial cds | |
| 155 | 3538.M05.GZ43_504619 | AC079878 | Homo sapiens BAC clone RP11-343P21 | 1.40E−07 |
| | | | from 7, complete sequence | |
| 156 | 3538.M08.GZ43_504667 | AF182668 | Zenaida galapagoensis beta-fibrinogen | 4.70E−08 |
| | | | gene, partial sequence | |
| 157 | 3538.N20.GZ43_504860 | AB033411 | Taenia crassiceps mitochondrial gene for | 6.80E−07 |
| | | | cytochrome c oxidase subunit 1, partial | |
| | | | cds | |
| 158 | 3538.O07.GZ43_504653 | X68019 | Feline Immunodeficiency Virus GAG | 4.00E−06 |
| | | | gene | |
| 159 | 3541.E11.GZ43_505091 | M73447 | Human repeat polymorphism at locus | 3.00E−08 |
| | | | D9S59 | |
| 160 | 3541.E14.GZ43_505139 | AJ243419 | Acaulospora trappei partial 18S rRNA, | 1.10E−07 |
| | | | 5.8S rRNA and partial 28S rRNA genes | |
| | | | and internal transcribed spacers 1 and 2 | |
| | | | (ITS1, ITS2), isolate AU 219 | |
| 161 | 3541.E15.GZ43_505155 | U13679 | Human lactate dehydrogenase-A (LDH- | 3.50E−10 |
| | | | A) gene, promoter region | |
| 162 | 3541.G17.GZ43_505189 | AE004851 | Pseudomonas aeruginosa PA01, section | 1.30E−05 |
| | | | 412 of 529 of the complete genome | |
| 163 | 3541.H14.GZ43_505142 | AJ252202 | Drosophila melanogaster D-COQ7 gene | 9.00E−06 |
| | | | for putative COQ7 isologue, exons 1-3 | |
| 164 | 3541.I15.GZ43_505159 | X98371 | D. subobscura sex-lethal gene | 6.00E−06 |
| 165 | 3541.I17.GZ43_505191 | AK023918 | Homo sapiens cDNA FLJ13856 fis, | 1.70E−22 |
| | | | clone THYRO1000988 | |
| 166 | 3541.I18.GZ43_505207 | AF329081 | Bos taurus AMP-activated protein kinase | 5.30E−33 |
| | | | gamma-1 (PRKAG1) gene, partial cds | |
| 167 | 3541.J19.GZ43_505224 | AF002749 | Psychotria urceolata ribosomal protein | 3.01E−03 |
| | | | S16 (rps16) gene, chloroplast gene | |
| | | | encoding chloroplast protein, partial | |
| | | | intron | |
| 168 | 3541.K09.GZ43_505065 | AF027607 | Gallus gallus L-type voltage-gated | 9.00E−06 |
| | | | calcium channel alpha1D subunit | |
| | | | ChCaChA1D precursor mRNA, | |
| | | | complete intron sequence | |
| 169 | 3541.L19.GZ43_505226 | AE003949 | Xylella fastidiosa 9a5c, section 95 of 229 | 2.00E−06 |
| | | | of the complete genome | |
| 170 | 3541.M02.GZ43_504955 | BC004556 | Homo sapiens, Similar to CG7083 gene | 6.20E−07 |
| | | | product, clone MGC: 10534 | |
| | | | IMAGE: 3957147, mRNA, complete cds | |
| 171 | 3541.M07.GZ43_505035 | X05616 | Kangaroo rat repetitive DNA with | 4.80E−08 |
| | | | insertion sequence | |
| 172 | 3541.M18.GZ43_505211 | M81888 | Parvovirus LuII DNA sequence | 6.60E−05 |
| 173 | 3541.O04.GZ43_504989 | AF081828 | Ixodes hexagonus mitochondrial DNA, | 3.00E−06 |
| | | | complete genome | |
| 174 | 3541.O13.GZ43_505133 | AK026465 | Homo sapiens cDNA: FLJ22812 fis, | 8.00E−06 |
| | | | clone KAIA2955 | |
| 175 | 3541.O23.GZ43_505293 | X54859 | Porcine TNF-alpha and TNF-beta genes | 2.90E−05 |
| | | | for tumour necrosis factors alpha and | |
| | | | beta, respectively | |
| 176 | 3541.P05.GZ43_505006 | AE006642 | Sulfolobus solfataricus section 1 of 272 | 3.50E−05 |
| | | | of the complete genome | |
| 177 | 3541.P22.GZ43_505278 | U10400 | Saccharomyces cerevisiae chromosome | 1.80E−05 |
| | | | VIII cosmid L2825 | |
| 178 | 3544.A09.GZ43_505439 | X75677 | C. parapsilosis mt tRNA genes (591 bps) | 3.70E−08 |
| 179 | 3544.A13.GZ43_505503 | D28811 | Schistosoma japonicum mRNA for | 5.40E−05 |
| | | | paramyosin, complete cds | |
| 180 | 3544.A14.GZ43_505519 | M87111 | Human immunodeficiency virus type 2 | 2.90E−05 |
| | | | (FORTC2) reverse transcriptase | |
| | | | fragment | |
| 181 | 3544.A17.GZ43_505567 | L23650 | Caenorhabditis elegans cosmid C27D11, | 5.60E−07 |
| | | | complete sequence | |
| 182 | 3544.B02.GZ43_505328 | AF060543 | Homo sapiens importin alpha 7 subunit | 1.50E−49 |
| | | | mRNA, complete cds | |
| 183 | 3544.B09.GZ43_505440 | AB051473 | Homo sapiens mRNA for KIAA1686 | 1.80E−05 |
| | | | protein, partial cds | |
| 184 | 3544.B18.GZ43_505584 | AJ224821 | Loxodonta africana complete | 4.00E−06 |
| | | | mitochondrial genomic sequence | |
| 185 | 3544.E05.GZ43_505379 | AL451187 | Human DNA sequence from clone | 1.30E−07 |
| | | | RP11-49J23 on chromosome 6, complete | |
| | | | sequence [Homo sapiens] | |
| 186 | 3544.E18.GZ43_505587 | L08338 | Human immunodeficiency virus type 1 | 3.30E−07 |
| | | | proviral envelope glycoprotein gene V3 | |
| | | | region from A196/4537, clone 6 (from | |
| | | | adult) | |
| 187 | 3544.F06.GZ43_505396 | X60833 | R. norvegicus TDO2 gene for tryptophan | 7.80E−07 |
| | | | 2,3-dioxygenase, exon 6 | |
| 188 | 3544.F16.GZ43_505556 | U72716 | Drosophila melanogaster D3-100EF | 2.00E−06 |
| | | | mRNA, complete cds | |
| 189 | 3544.G06.GZ43_505397 | AC002359 | Homo sapiens Xp22 Cosmid U239B3 | 1.60E−05 |
| | | | (from Lawrence Livermore X library) | |
| | | | complete sequence | |
| 190 | 3544.G10.GZ43_505461 | X56015 | Crithidia oncopelti mitochondrial ND4, | 4.80E−05 |
| | | | ND5, COI, 12S ribosomal RNA genes | |
| | | | for NADH dehydrogenase subunit 4/5, | |
| | | | cytochrome oxidase subunit I and 12S | |
| | | | ribosomal RNA | |
| 191 | 3544.G11.GZ43_505477 | U80927 | Dictyostelium discoideum unknown | 9.00E−08 |
| | | | protein gene, complete cds | |
| 192 | 3544.G12.GZ43_505493 | AF245483 | Oryza sativa OSE4 (OSE4) gene, | 1.70E−07 |
| | | | complete cds | |
| 193 | 3544.H03.GZ43_505350 | Y12855 | Homo sapiens P2X7 gene, exon 12 and | 2.30E−05 |
| | | | 13 | |
| 194 | 3544.H15.GZ43_505542 | AF194829 | Tetragonia tetragonioides NADH | 2.00E−06 |
| | | | dehydrogenase (ndhF) gene, partial cds; | |
| | | | chloroplast gene for chloroplast product | |
| 195 | 3544.H24.GZ43_505686 | BC008353 | Homo sapiens, Similar to RIKEN cDNA | 2.50E−18 |
| | | | 0610008P16 gene, clone MGC: 15937 | |
| | | | IMAGE: 3537224, mRNA, complete cds | |
| 196 | 3544.I07.GZ43_505415 | AF010533 | Plasmodium falciparum microsatellite | 1.80E−08 |
| | | | TA21 sequence | |
| 197 | 3544.I15.GZ43_505543 | D29794 | Mouse gene for T cell receptor gamma | 3.00E−06 |
| | | | chain | |
| 198 | 3544.I20.GZ43_505623 | AE000677 | Aquifex aeolicus section 9 of 109 of the | 4.00E−06 |
| | | | complete genome | |
| 199 | 3544.J04.GZ43_505368 | Z97015 | Lactococcus lactis cremoris sucrose gene | 1.00E−06 |
| | | | cluster | |
| 200 | 3544.J11.GZ43_505480 | M67480 | Human prothymosin-alpha gene, | 5.10E−10 |
| | | | complete cds | |
| 201 | 3544.J13.GZ43_505512 | AJ249884 | Lepeophtheirus salmonis microsatellite | 5.70E−08 |
| | | | DNA, locus Ls.NUIG.09 | |
| 202 | 3544.J23.GZ43_505672 | AJ245823 | Trypanosoma brucei PK4 gene for | 6.00E−06 |
| | | | protein kinase | |
| 203 | 3544.K16.GZ43_505561 | U18191 | Human HLA class I genomic survey | 2.50E−07 |
| | | | sequence | |
| 204 | 3544.L11.GZ43_505482 | X07127 | Kluyveromyces lactis killer plasmid k1 | 2.90E−05 |
| | | | DNA | |
| 205 | 3544.L13.GZ43_505514 | BC005028 | Homo sapiens, hypothetical protein | 1.80E−31 |
| | | | FLJ11323, clone MGC: 12582 | |
| | | | IMAGE: 3953383, mRNA, complete cds | |
| 206 | 3544.M06.GZ43_505403 | AC006687 | Caenorhabditis elegans cosmid T20C7, | 2.30E−05 |
| | | | complete sequence | |
| 207 | 3544.M10.GZ43_505467 | M92378 | Mus musculus GABA transporter | 1.30E−05 |
| | | | mRNA sequence | |
| 208 | 3544.N07.GZ43_505420 | U48705 | Human receptor tyrosine kinase DDR | 7.40E−07 |
| | | | gene, complete cds | |
| 209 | 3544.N12.GZ43_505500 | BC007621 | Homo sapiens, Similar to Orthodenticle | 5.70E−07 |
| | | | (Drosophila) homolog 1, clone | |
| | | | MGC: 15736 IMAGE: 3355563, mRNA, | |
| | | | complete cds | |
| 210 | 3544.N19.GZ43_505612 | AF270077 | Staphylococcus epidermidis strain SR1 | 2.00E−07 |
| | | | clone step.1047c06 genomic sequence | |
| 211 | 3544.O03.GZ43_505357 | U15681 | Myrmecia pilosula HI87-156 | 1.00E−06 |
| | | | mitochondrion cytochrome b gene, | |
| | | | partial cds | |
| 212 | 3544.O10.GZ43_505469 | AF056032 | Homo sapiens kynurenine 3-hydroxylase | 5.00E−06 |
| | | | mRNA, complete cds | |
| 213 | 3544.O15.GZ43_505549 | U37373 | Xenopus laevis tail-specific thyroid | 3.00E−06 |
| | | | hormone up-regulated (gene 5) mRNA, | |
| | | | complete cds | |
| 214 | 3544.O20.GZ43_505629 | D66906 | Bombyx mori DNA for sorbitol | 2.00E−06 |
| | | | dehydrogenase, complete cds | |
| 215 | 3544.P18.GZ43_505598 | J04357 | Red clover necrotic mosaic virus RNA-1, | 4.00E−06 |
| | | | complete sequence | |
| 216 | 3547.A04.GZ43_505743 | AF118558 | Mus musculus hitchhiker-3, hitchhiker-4, | 5.40E−07 |
| | | | and hitchhiker-5 mRNA sequences | |
| 217 | 3547.A11.GZ43_505855 | U93874 | Bacillus subtilis cysteine synthase | 4.00E−06 |
| | | | (yrhA), cystathionine gamma-lyase | |
| | | | (yrhB), YrhC (yrhC), YrhD (yrhD), | |
| | | | formate dehydrogenase chain A (yrhE), | |
| | | | YrhF (yrhF), formate dehydrogenase | |
| | | | (yrhG), YrhH (yrhH), regulatory protein | |
| | | | (yrhI), cytochrome P450 102 (yrhJ),> | |
| 218 | 3547.A24.GZ43_506063 | AL157466 | Homo sapiens mRNA; cDNA | 8.80E−07 |
| | | | DKFZp761E2423 (from clone | |
| | | | DKFZp761E2423) | |
| 219 | 3547.C05.GZ43_505761 | X52589 | Bovine rotavirus RNA for virus protein 2 | 1.00E−05 |
| | | | (VP2) | |
| 220 | 3547.C17.GZ43_505953 | U67594 | Methanococcus jannaschii section 136 of | 3.80E−05 |
| | | | 150 of the complete genome | |
| 221 | 3547.C23.GZ43_506049 | AJ250862 | Bacillus sp. HIL-Y85/54728 mersacidin | 1.20E−05 |
| | | | biosynthesis gene cluster (mrsK2, | |
| | | | mrsR2, mrsF, mrsG, mrsE, mrsA, | |
| | | | mrsR1, mrsD, mrsM and mrsT genes) | |
| 222 | 3547.D19.GZ43_505986 | AF050491 | Microgadus tomcod aromatic | 4.00E−06 |
| | | | hydrocarbon receptor (ahr) gene, exons | |
| | | | 8-11, partial cds | |
| 223 | 3547.D23.GZ43_506050 | M33190 | Rat cytochrome P450 II A3 (CYP2A3) | 5.80E−05 |
| | | | gene, complete cds | |
| 224 | 3547.E04.GZ43_505747 | L35658 | Homo sapiens (subclone H8 9_d12 from | 7.70E−07 |
| | | | P1 35 H5 C8) DNA sequence | |
| 225 | 3547.F02.GZ43_505716 | AF038190 | Homo sapiens clone 23582 mRNA | 1.10E−07 |
| | | | sequence | |
| 226 | 3547.F10.GZ43_505844 | AY008833 | Staphylococcus aureus tcaR-tcaA-tcaB | 5.00E−06 |
| | | | operon, complete sequences | |
| 227 | 3547.F20.GZ43_506004 | AB037821 | Homo sapiens mRNA for KIAA1400 | 1.00E−06 |
| | | | protein, partial cds | |
| 228 | 3547.G02.GZ43_505717 | M88397 | Naegleria fowleri virulence-related | 3.70E−07 |
| | | | protein (NF314) mRNA, complete cds | |
| 229 | 3547.G09.GZ43_505829 | AJ315644 | Homo sapiens mRNA for proton myoinositol | 7.90E−07 |
| | | | symporter (Hmit gene) | |
| 230 | 3547.G22.GZ43_506037 | Z33603 | P. radiata (Pr1.6) microsatellite DNA, | 1.70E−07 |
| | | | 703 bp | |
| 231 | 3547.H12.GZ43_505878 | L04309 | Shigella flexneri ipgD, ipgE, ipgF genes, | 3.00E−06 |
| | | | complete cds | |
| 232 | 3547.H14.GZ43_505910 | AL137502 | Homo sapiens mRNA; cDNA | 2.90E−07 |
| | | | DKFZp761H171 (from clone | |
| | | | DKFZp761H171); partial cds | |
| 233 | 3547.I07.GZ43_505799 | M15332 | B. sphaericus ermG gene encoding rRNA | 7.00E−06 |
| | | | methyltransferase (macrolide- | |
| | | | lincosamide-streptogramin B resistance | |
| | | | element) | |
| 234 | 3547.I16.GZ43_505943 | AF015157 | Homo sapiens clone HS19.12 Alu-Ya5 | 4.70E−10 |
| | | | sequence | |
| 235 | 3547.I17.GZ43_505959 | AE007758 | Clostridium acetobutylicum ATCC824 | 3.00E−06 |
| | | | section 246 of 356 of the complete | |
| | | | genome | |
| 236 | 3547.I20.GZ43_506007 | L37606 | Medicago sativa (clone GG16-1) | 1.50E−05 |
| | | | NADH-dependent glutamate synthase | |
| | | | gene, complete cds | |
| 237 | 3547.J05.GZ43_505768 | Z16911 | H. sapiens (D20S113) DNA segment | 2.80E−07 |
| | | | containing (CA) repeat; clone | |
| | | | AFM205th8; single read | |
| 238 | 3547.J10.GZ43_505848 | Z37803 | HIV-1 DNA V3 region (patient 15, | 8.80E−07 |
| | | | sample CSF, clone 9) | |
| 239 | 3547.J20.GZ43_506008 | AF013273 | Candida albicans histidine kinase 1 gene, | 3.30E−05 |
| | | | complete cds | |
| 240 | 3547.J22.GZ43_506040 | AF289080 | Lycopersicon esculentum alpha- | 4.00E−06 |
| | | | galactosidase gene, partial cds | |
| 241 | 3547.K01.GZ43_505705 | AF267863 | Homo sapiens DC43 mRNA, complete | 7.30E−22 |
| | | | cds | |
| 242 | 3547.L09.GZ43_505834 | Z22175 | Caenorhabditis elegans cosmid K01F9, | 1.40E−05 |
| | | | complete sequence | |
| 243 | 3547.L11.GZ43_505866 | AJ288648 | Limnodynastes tasmaniensis | 5.90E−07 |
| | | | mitochondrial partial nadh4 gene for | |
| | | | NADH dehydrogenase subunit 4 and | |
| | | | partial tRNA-His gene, sample 26 from | |
| | | | Australia: Boolara | |
| 244 | 3547.L16.GZ43_505946 | AE001293 | Chlamydia trachomatis section 20 of 87 | 7.10E−07 |
| | | | of the complete genome | |
| 245 | 3547.L22.GZ43_506042 | AF287006 | Danio rerio T-box brain 1 mRNA, partial | 7.00E−06 |
| | | | cds | |
| 246 | 3547.M02.GZ43_505723 | AE007788 | Clostridium acetobutylicum ATCC824 | 1.00E−05 |
| | | | section 276 of 356 of the complete | |
| | | | genome | |
| 247 | 3547.M07.GZ43_505803 | Z46252 | M. musculus DNA for region | 6.00E−06 |
| | | | surrounding retrovirus restriction locus | |
| | | | Fv1 | |
| 248 | 3547.M08.GZ43_505819 | AB020684 | Homo sapiens mRNA for KIAA0877 | 1.50E−05 |
| | | | protein, partial cds | |
| 249 | 3547.M16.GZ43_505947 | AF335240 | Petunia x hybrida MADS-box | 3.00E−06 |
| | | | transcription factor FBP22 (FBP22) | |
| | | | mRNA, complete cds | |
| 250 | 3547.N06.GZ43_505788 | AF299346 | Renispora flavissima isolate CEH313 | 1.70E−08 |
| | | | 18S ribosomal RNA gene, partial | |
| | | | sequence; internal transcribed spacer 1, | |
| | | | 5.8S ribosomal RNA gene and internal | |
| | | | transcribed spacer 2, complete sequence; | |
| | | | and 28S ribosomal RNA gene, partial | |
| | | | sequence | |
| 251 | 3547.O03.GZ43_505741 | AE002344 | Chlamydia muridarum, section 72 of 85 | 6.60E−07 |
| | | | of the complete genome | |
| 252 | 3547.O07.GZ43_505805 | D50608 | Rat gene for cholecystokinin type-A | 1.60E−05 |
| | | | receptor (CCKAR), complete cds | |
| 253 | 3547.O14.GZ43_505917 | AL137502 | Homo sapiens mRNA; cDNA | 2.90E−07 |
| | | | DKFZp761H171 (from clone | |
| | | | DKFZp761H171); partial cds | |
| 254 | 3547.P18.GZ43_505982 | AJ131734 | Plasmodium berghei DNA including | 6.10E−07 |
| | | | upstream sequence NTS and 5′ETS of | |
| | | | the 18S rRNA gene (A rRNA gene unit) | |
| 255 | 3547.P21.GZ43_506030 | AC006619 | Caenorhabditis elegans cosmid C46C11, | 1.70E−05 |
| | | | complete sequence | |
| 256 | 3547.P22.GZ43_506046 | AJ000871 | Streptococcus mitis comC, comD, comE | 2.00E−06 |
| | | | genes, isolate B5 | |
| 257 | 3550.A12.GZ43_506255 | M22310 | Human epidermal growth factor receptor | 4.80E−07 |
| | | | proto-oncogene downstream enhancer | |
| 258 | 3550.A16.GZ43_506319 | L39435 | Senecio mikanioides chloroplast NADH | 2.00E−06 |
| | | | dehydrogenase (ndhF) gene, complete | |
| | | | cds | |
| 259 | 3550.B06.GZ43_506160 | D14161 | Hordeum vulgare ids-4 mRNA, complete | 1.10E−08 |
| | | | cds | |
| 260 | 3550.C01.GZ43_506081 | AK025182 | Homo sapiens cDNA: FLJ21529 fis, | 4.20E−09 |
| | | | clone COL05981 | |
| 261 | 3550.C22.GZ43_506417 | X52028 | Rattus norvegicus P450 IID3 gene | 1.41E−04 |
| 262 | 3550.D16.GZ43_506322 | Y10345 | H. sapiens GalNAc-T3 gene, 3′UTR | 5.00E−07 |
| 263 | 3550.D23.GZ43_506434 | AF134403 | Escherichia coli plasmid pAA2 Shf (shf), | 6.90E−07 |
| | | | hexosyltransferase homolog (capU), and | |
| | | | VirK (virK) genes, complete cds | |
| 264 | 3550.E02.GZ43_506099 | U66074 | Tritrichomonas foetus putative | 8.90E−07 |
| | | | superoxide dismutase 2 (SOD2) gene, | |
| | | | complete cds | |
| 265 | 3550.E06.GZ43_506163 | Z23341 | H. sapiens (D8S528) DNA segment | 2.30E−08 |
| | | | containing (CA) repeat; clone | |
| | | | AFM080xh7; single read | |
| 266 | 3550.F06.GZ43_506164 | M59447 | Drosophila melanogaster Sex-lethal | 3.00E−06 |
| | | | (Sx1) mRNA, complete cds | |
| 267 | 3550.F08.GZ43_506196 | M24901 | Rabbit pulmonary surfactant-associated | 3.40E−07 |
| | | | protein (SP-B) mRNA, complete cds | |
| 268 | 3550.F20.GZ43_506388 | AF216169 | Simicratea welwitschii clone 2 | 5.40E−08 |
| | | | phytochrome B (PHYB) gene, exon 1 | |
| | | | and partial cds | |
| 269 | 3550.F22.GZ43_506420 | AP000739 | Arabidopsis thaliana genomic DNA, | 2.20E−05 |
| | | | chromosome 3, P1 clone: MEK6 | |
| 270 | 3550.G02.GZ43_506101 | AL022342 | Human DNA sequence from clone RP1- | 7.40E−05 |
| | | | 29M10 on chromosome 20, complete | |
| | | | sequence [Homo sapiens] | |
| 271 | 3550.G08.GZ43_506197 | AK021312 | Mus musculus 13 days embryo stomach | 3.60E−08 |
| | | | cDNA, RIKEN full-length enriched | |
| | | | library, clone: D530039A21, full insert | |
| | | | sequence | |
| 272 | 3550.G10.GZ43_506229 | M31684 | D. melanogaster cytoskeleton-like | 3.00E−06 |
| | | | bicaudalD protein (BicD) mRNA, | |
| | | | complete cds | |
| 273 | 3550.G15.GZ43_506309 | AF087141 | Mus musculus uncharacterized long | 4.00E−06 |
| | | | terminal repeat, complete sequence; and | |
| | | | valyl-tRNA synthetase (G7a) gene, | |
| | | | complete cds | |
| 274 | 3550.G23.GZ43_506437 | X02547 | Trypanosoma brucei mitochondrial | 2.00E−06 |
| | | | genes for 12S and 9S ribosomal RNA | |
| 275 | 3550.H10.GZ43_506230 | U55711 | Human ataxia-telangiectasia (ATM) | 6.10E−08 |
| | | | gene, exon 11 | |
| 276 | 3550.H21.GZ43_506406 | Z68755 | Human DNA sequence from cosmid | 2.00E−06 |
| | | | L118D5, Huntington's Disease Region, | |
| | | | chromosome 4p16.3 | |
| 277 | 3550.H23.GZ43_506438 | AF151388 | Dermatobia hominis strain Alfenas | 1.20E−07 |
| | | | tRNA-Ile gene, partial sequence; D-loop, | |
| | | | complete sequence; and 12S ribosomal | |
| | | | RNA, partial sequence; mitochondrial | |
| | | | genes for mitochondrial products | |
| 278 | 3550.I03.GZ43_506119 | AF117258 | Staphylococcus aureus plasmid pIP680 | 6.50E−08 |
| | | | replication protein RepE (repE) gene, | |
| | | | partial cds; resolvase (res), | |
| | | | acetyltransferase Vat (vat), and | |
| | | | hydrolase VgB (vgb) genes, complete | |
| | | | cds; and unknown gene | |
| 279 | 3550.I19.GZ43_506375 | AE002781 | Drosophila melanogaster genomic | 3.90E−05 |
| | | | scaffold 142000013385442, complete | |
| | | | sequence | |
| 280 | 3550.I21.GZ43_506407 | AE001002 | Archaeoglobus fulgidus section 105 of | 4.20E−05 |
| | | | 172 of the complete genome | |
| 281 | 3550.J05.GZ43_506152 | AF080689 | Homo sapiens protein kinase PITSLRE | 5.50E−10 |
| | | | (CDC2L2) gene, exons 8 and 9 | |
| 282 | 3550.J11.GZ43_506248 | Z82761 | R. prowazekii genomic DNA fragment | 1.00E−06 |
| | | | (clone A793R) | |
| 283 | 3550.K05.GZ43_506153 | X15407 | Maize pseudo-Gpa2 pseudogene for | 3.20E−05 |
| | | | glyceraldehyde-3-phosphate | |
| | | | dehydrogenase subunit A | |
| 284 | 3550.K09.GZ43_506217 | X62631 | S. pombe wis1 gene for protein kinase | 1.50E−07 |
| 285 | 3550.K14.GZ43_506297 | M59743 | Rabbit cardiac muscle Ca-2+ release | 1.00E−06 |
| | | | channel (ryanodine receptor) mRNA, | |
| | | | complete cds | |
| 286 | 3550.L16.GZ43_506330 | AF201383 | Buchnera aphidicola isopropylmalate | 1.00E−06 |
| | | | dehydratase subunit (leuC) gene, partial | |
| | | | cds | |
| 287 | 3550.L19.GZ43_506378 | M77244 | H. sapiens erythropoietin receptor | 4.00E−09 |
| | | | (EPOR) gene, 5′ end | |
| 288 | 3550.L23.GZ43_506442 | L76259 | Homo sapiens PTS gene, complete cds | 8.00E−06 |
| 289 | 3550.M21.GZ43_506411 | M87339 | Human replication factor C, 37-kDa | 5.00E−06 |
| | | | subunit mRNA, complete cds | |
| 290 | 3550.N01.GZ43_506092 | AF191009 | Helicobacter pylori strain ChinaF30A | 1.10E−07 |
| | | | cag pathogenicity island polymorphic | |
| | | | right end, type IIIa motif | |
| 291 | 3550.N07.GZ43_506188 | AF235499 | Mus musculus SH2-containing inositol | 1.55E−04 |
| | | | 5-phosphatase (Ship) gene, exons 3 | |
| | | | through 6 | |
| 292 | 3550.O03.GZ43_506125 | D14813 | Human DNA for osteopontin, complete | 4.50E−05 |
| | | | cds | |
| 293 | 3550.O04.GZ43_506141 | U08596 | Canis familiaris delayed rectifier K+ | 6.00E−06 |
| | | | channel mRNA, partial cds | |
| 294 | 3550.O08.GZ43_506205 | XM_017044 | Homo sapiens similar to diaphanous | 6.40E−09 |
| | | | (Drosophila, homolog) 2 (H. sapiens) | |
| | | | (LOC91459), mRNA | |
| 295 | 3550.O15.GZ43_506317 | U15977 | Mus musculus long chain fatty acyl CoA | 2.80E−05 |
| | | | synthetase mRNA, complete cds | |
| 296 | 3550.O17.GZ43_506349 | X62578 | C. caldarium plastid genes ompR′, psbD, | 2.80E−05 |
| | | | psbC, rps16 and groEL | |
| 297 | 3550.O18.GZ43_506365 | L34363 | Human X-linked nuclear protein (XNP) | 4.00E−06 |
| | | | gene, complete cds | |
| 298 | 3550.O21.GZ43_506413 | AB056784 | Macaca fascicularis brain cDNA | 5.20E−07 |
| | | | clone: QnpA-11501, full insert sequence | |
| 299 | 3550.P18.GZ43_506366 | AK002041 | Homo sapiens cDNA FLJ11179 fis, | 5.30E−07 |
| | | | clone PLACE1007450 | |
| 300 | 3550.P23.GZ43_506446 | AF200361 | Rattus norvegicus cytochrome P450 4F1 | 1.40E−05 |
| | | | (Cyp4F1) gene, complete cds | |
| 301 | 3553.A09.GZ43_506591 | AL109980 | Human DNA sequence from clone RP4- | 3.50E−12 |
| | | | 697G8 on chromosome 22, complete | |
| | | | sequence [Homo sapiens] | |
| 302 | 3553.B07.GZ43_506560 | L37056 | Strongylocentrotus purpuratus myc | 4.60E−07 |
| | | | protein mRNA, complete cds | |
| 303 | 3553.B16.GZ43_506704 | U43542 | Nicotiana tabacum diphenol oxidase | 2.00E−06 |
| | | | mRNA, complete cds | |
| 304 | 3553.B22.GZ43_506800 | L34040 | Homo sapiens stromelysin gene, | 6.00E−06 |
| | | | promoter region | |
| 305 | 3553.D04.GZ43_506514 | Y07599 | S. pombe mRNA for dmf1 gene | 9.40E−07 |
| 306 | 3553.D07.GZ43_506562 | X13835 | R. norvegicus CaMII gene, exons 3, 4 & 5 | 2.00E−06 |
| 307 | 3553.D14.GZ43_506674 | L38424 | Bacillus subtilis dihydropicolinate | 1.80E−05 |
| | | | reductase (jojE) gene, complete cds; | |
| | | | poly(A) polymerase (jojI) gene, | |
| | | | complete cds; biotin acetyl-CoA- | |
| | | | carboxylase ligase (birA) gene, complete | |
| | | | cds; jojC, jojD, jojF, jojG, jojH genes, | |
| | | | complete cds's | |
| 308 | 3553.D19.GZ43_506754 | X53431 | Yeast gene for STE11 | 9.00E−06 |
| 309 | 3553.E08.GZ43_506579 | AF062863 | Arabidopsis thaliana putative | 1.80E−07 |
| | | | transcription factor (MYB11) mRNA, | |
| | | | partial cds | |
| 310 | 3553.E09.GZ43_506595 | X71067 | X. laevis XFG 5-1 and XFG 5-2 genes for | 6.60E−05 |
| | | | zinc finger proteins | |
| 311 | 3553.F12.GZ43_506644 | X63223 | B. taurus CI-MNLL mRNA for | 6.90E−08 |
| | | | ubiquinone oxidoreductase complex | |
| 312 | 3553.F13.GZ43_506660 | L81869 | Homo sapiens (subclone 1_c4 from P1 | 3.00E−08 |
| | | | H55) DNA sequence, complete sequence | |
| 313 | 3553.F19.GZ43_506756 | U97190 | Caenorhabditis elegans cosmid B0025, | 3.00E−06 |
| | | | complete sequence | |
| 314 | 3553.G05.GZ43_506533 | S76404 | beta-HKA = H, K-ATPase beta-subunit | 8.00E−06 |
| | | | [rats, Genomic, 8983 nt, segment 2 of 2] | |
| 315 | 3553.G06.GZ43_506549 | X68048 | Phaseolus vulgaris chloroplast DNA for | 5.00E−06 |
| | | | tRNA-His gene region | |
| 316 | 3553.G07.GZ43_506565 | AF068289 | Homo sapiens HDCMD34P mRNA, | 4.40E−12 |
| | | | complete cds | |
| 317 | 3553.G21.GZ43_506789 | Z33603 | P. radiata (Pr1.6) microsatellite DNA, | 1.70E−07 |
| | | | 703 bp | |
| 318 | 3553.H06.GZ43_506550 | AF090901 | Homo sapiens clone HQ0195$ PRO0195 | 8.00E−07 |
| | | | mRNA, complete cds | |
| 319 | 3553.H09.GZ43_506598 | AF270105 | Staphylococcus epidermidis strain SR1 | 9.80E−07 |
| | | | clone step.1049c09 genomic sequence | |
| 320 | 3553.H21.GZ43_506790 | Z18359 | Glycine max seed-specific low molecular | 2.00E−06 |
| | | | weight sulfur-rich protein | |
| 321 | 3553.I13.GZ43_506663 | AF155115 | Homo sapiens NY-REN-58 antigen | 1.70E−07 |
| | | | mRNA, complete cds | |
| 322 | 3553.I16.GZ43_506711 | AF270229 | Staphylococcus epidermidis strain SR1 | 1.20E−05 |
| | | | clone step.1055d10 genomic sequence | |
| 323 | 3553.J12.GZ43_506648 | U53400 | Rattus norvegicus chromosome 10 | 1.55E−01 |
| | | | microsatellite sequence D10Mco21 | |
| 324 | 3553.J14.GZ43_506680 | M10014 | Homo sapiens map 4q28 fibrinogen | 9.00E−06 |
| | | | (FGG) gene, alternative splice products, | |
| | | | complete cds | |
| 325 | 3553.J16.GZ43_506712 | Z23341 | H. sapiens (D8S528) DNA segment | 2.30E−08 |
| | | | containing (CA) repeat; clone | |
| | | | AFM080xh7; single read | |
| 326 | 3553.J17.GZ43_506728 | AK021312 | Mus musculus 13 days embryo stomach | 3.60E−08 |
| | | | cDNA, RIKEN full-length enriched | |
| | | | library, clone: D530039A21, full insert | |
| | | | sequence | |
| 327 | 3553.J22.GZ43_506808 | AF120279 | Mus musculus proline dehydrogenase | 5.00E−06 |
| | | | mRNA, complete cds | |
| 328 | 3553.J24.GZ43_506840 | Z18359 | Glycine max seed-specific low molecular | 2.00E−06 |
| | | | weight sulfur-rich protein | |
| 329 | 3553.K01.GZ43_506473 | U31465 | Kluyveromyces lactis telomerase RNA | 2.00E−06 |
| | | | component (TER1) gene, complete | |
| | | | sequence | |
| 330 | 3553.K02.GZ43_506489 | X60672 | M. musculus mRNA for radixin | 1.00E−06 |
| 331 | 3553.K03.GZ43_506505 | Z71943 | G. hyalina (92-89) DNA for internal | 1.06E−02 |
| | | | transcribed spacer 1 | |
| 332 | 3553.K05.GZ43_506537 | M80596 | Saccharomyces cerevisiae VAC1 gene | 6.00E−06 |
| | | | (required for vacuole inheritance and | |
| | | | vacuole protein sorting), complete cds | |
| 333 | 3553.K07.GZ43_506569 | AJ275317 | Cicer arietinum partial mRNA for malate | 7.60E−07 |
| | | | dehydrogenase | |
| 334 | 3553.K15.GZ43_506697 | X57377 | Mouse dilute myosin heavy chain gene | 2.40E−05 |
| | | | for novel heavy chain with unique C- | |
| | | | terminal region | |
| 335 | 3538.A11.GZ43_504703 | Z75199 | S. cerevisiae chromosome XV reading | 6.00E−06 |
| | | | frame ORF YOR291w | |
| 336 | 3538.A24.GZ43_504911 | AF270077 | Staphylococcus epidermidis strain SR1 | 2.00E−07 |
| | | | clone step.1047c06 genomic sequence | |
| 337 | 3538.B01.GZ43_504544 | AF368255 | Arabidopsis thaliana small zinc finger- | 4.10E−07 |
| | | | like protein TIM13 mRNA, complete | |
| | | | cds; nuclear gene for mitochondrial | |
| | | | product | |
| 338 | 3538.B20.GZ43_504848 | AB069994 | Macaca fascicularis testis cDNA | 1.40E−07 |
| | | | clone: QtsA-10636, full insert sequence | |
| 339 | 3538.C01.GZ43_504545 | AF072375 | Pseudoalteromonas sp. S9 beta- | 1.50E−04 |
| | | | hexosaminidase (chiP) gene, complete | |
| | | | cds | |
| 340 | 3538.C02.GZ43_504561 | AJ011271 | Human immunodeficiency virus type 2 | 7.10E−08 |
| | | | partial env gene, isolate b1286 | |
| 341 | 3538.D06.GZ43_504626 | AF100765 | Oryza sativa receptor-like kinase | 3.00E−06 |
| | | | (8ARK1) gene, complete cds | |
| 342 | 3538.D09.GZ43_504674 | Z47784 | M. musculus mRNA expressed in islet | 3.40E−08 |
| | | | cells (clone 58) | |
| 343 | 3538.D21.GZ43_504866 | AE006568 | Streptococcus pyogenes M1 GAS strain | 6.00E−07 |
| | | | SF370, section 97 of 167 of the complete | |
| | | | genome | |
| 344 | 3538.E15.GZ43_504771 | AB027966 | Schizosaccharomyces pombe gene for | 2.30E−08 |
| | | | Hypothetical protein, partial cds, | |
| | | | clone: TB89 | |
| 345 | 3538.F02.GZ43_504564 | AK001871 | Homo sapiens cDNA FLJ11009 fis, | 5.90E−09 |
| | | | clone PLACE1003108 | |
| 346 | 3538.F08.GZ43_504660 | U39161 | Human phosphodiesterase (PDEA) gene, | 7.40E−07 |
| | | | intron 8, 5′ end | |
| 347 | 3553.K23.GZ43_506825 | Y12052 | Homo sapiens gene encoding guanine | 3.00E−06 |
| | | | nucleotide-binding protein beta3 subunit, | |
| | | | exon 5 | |
| 348 | 3553.K24.GZ43_506841 | AP001419 | Homo sapiens genomic DNA, | 1.00E−06 |
| | | | chromosome 21q22.2, clone: PAC24K9, | |
| | | | LB7T-ERG region, complete sequence | |
| 349 | 3553.L02.GZ43_506490 | X15028 | Chicken hsp90 gene for 90 kDa-heat | 3.60E−05 |
| | | | shock protein 5′-end | |
| 350 | 3553.L04.GZ43_506522 | L34665 | Rattus norvegicus H+/K+-ATPase beta | 1.20E−09 |
| | | | subunit (HKB) gene, exon 6 | |
| 351 | 3553.L21.GZ43_506794 | M87843 | Human transforming growth factor beta- | 2.30E−05 |
| | | | 2 gene, 5′ end | |
| 352 | 3553.M12.GZ43_506651 | AB026592 | Limnoporus esakii mitochondrial gene | 1.10E−07 |
| | | | for 16S ribosomal RNA, partial sequence | |
| 353 | 3553.M23.GZ43_506827 | AE006349 | Lactococcus lactis subsp. lactis IL1403 | 8.00E−07 |
| | | | section 111 of 218 of the complete | |
| | | | genome | |
| 354 | 3553.N01.GZ43_506476 | U80457 | Human transcription factor SIM2 short | 2.00E−06 |
| | | | form mRNA, complete cds | |
| 355 | 3553.N02.GZ43_506492 | U81144 | Caenorhabditis elegans non-alpha | 3.20E−07 |
| | | | nicotinic acetylcholine receptor subunit | |
| | | | precursor (unc-29) gene, complete cds | |
| 356 | 3553.N04.GZ43_506524 | AE006296 | Lactococcus lactis subsp. lactis IL1403 | 2.00E−06 |
| | | | section 58 of 218 of the complete | |
| | | | genome | |
| 357 | 3553.N07.GZ43_506572 | AK026258 | Homo sapiens cDNA: FLJ22605 fis, | 1.00E−06 |
| | | | clone HSI04743 | |
| 358 | 3553.N08.GZ43_506588 | U05822 | Human proto-oncogene BCL3 gene, | 1.90E−14 |
| | | | exon 2 | |
| 359 | 3553.O07.GZ43_506573 | X97196 | D. melanogaster X gene | 4.00E−06 |
| 360 | 3553.O18.GZ43_506749 | AE001146 | Borrelia burgdorferi (section 32 of 70) of | 1.60E−05 |
| | | | the complete genome | |
| 361 | 3553.O23.GZ43_506829 | X63509 | Mus musculus partial L1 gene, exons 2-4 | 6.00E−06 |
| 362 | 3553.P03.GZ43_506510 | M24901 | Rabbit pulmonary surfactant-associated | 4.20E−07 |
| | | | protein (SP-B) mRNA, complete cds | |
| 363 | 3553.P05.GZ43_506542 | AF239156 | Homo sapiens peptide deformylase-like | 1.00E−06 |
| | | | protein mRNA, complete cds | |
| 364 | 3553.P12.GZ43_506654 | AF283753 | Acipenser persicus isolate cw203 | 3.90E−07 |
| | | | cytochrome b gene, partial cds; | |
| | | | mitochondrial gene for mitochondrial | |
| | | | product | |
| 365 | 3553.P18.GZ43_506750 | AK021312 | Mus musculus 13 days embryo stomach | 3.50E−08 |
| | | | cDNA, RIKEN full-length enriched | |
| | | | library, clone: D530039A21, full insert | |
| | | | sequence | |
| 366 | 3553.P21.GZ43_506798 | AB044136 | Homo sapiens genomic DNA, clone: #7 | 4.00E−06 |
| 367 | 3556.A03.GZ43_506879 | X61084 | C. griseus rhodopsin gene for opsin | 4.30E−05 |
| | | | protein | |
| 368 | 3556.A06.GZ43_506927 | L46904 | Homo sapiens (subclone 4_c6 from P1 | 1.20E−08 |
| | | | H22) DNA sequence | |
| 369 | 3556.B06.GZ43_506928 | AK002041 | Homo sapiens cDNA FLJ11179 fis, | 1.40E−07 |
| | | | clone PLACE1007450 | |
| 370 | 3556.B09.GZ43_506976 | U88832 | Human groucho protein homolog (AES) | 7.00E−07 |
| | | | gene, exons 2-7 and complete cds | |
| 371 | 3556.B10.GZ43_506992 | M11925 | Influenza | 5.00E−06 |
| | | | A/chicken/Pennsylvania/8125/83 | |
| | | | (H5N2) neuraminidase (NA) gene, | |
| | | | complete cds | |
| 372 | 3556.B14.GZ43_507056 | Z80218 | Caenorhabditis elegans cosmid F52D4, | 2.20E−05 |
| | | | complete sequence | |
| 373 | 3556.C13.GZ43_507041 | AF348512 | Mus musculus polyamine-modulated | 8.00E−06 |
| | | | factor-1 gene, exons 2 through 5 and | |
| | | | complete cds | |
| 374 | 3556.C15.GZ43_507073 | X82013 | S. cerevisiae mRNA for SUL1 | 3.00E−06 |
| 375 | 3556.C18.GZ43_507121 | Z23973 | H. sapiens (D7S660) DNA segment | 5.00E−06 |
| | | | containing (CA) repeat; clone | |
| | | | AFM277vd5; single read | |
| 376 | 3556.C24.GZ43_507217 | AE001381 | Plasmodium falciparum chromosome 2, | 6.90E−07 |
| | | | section 18 of 73 of the complete | |
| | | | sequence | |
| 377 | 3556.D15.GZ43_507074 | U48288 | Rattus norvegicus A-kinase anchoring | 5.50E−07 |
| | | | protein AKAP 220 mRNA, complete cds | |
| 378 | 3556.D20.GZ43_507154 | AF092684 | Neochlamisus scabripennis haplotype | 4.00E−07 |
| | | | 113 cytochrome oxidase I (COI) gene, | |
| | | | mitochondrial gene encoding | |
| | | | mitochondrial protein, partial cds | |
| 379 | 3556.D23.GZ43_507202 | X16416 | Human c-abl mRNA encoding p150 | 2.25E−04 |
| | | | protein | |
| 380 | 3556.E13.GZ43_507043 | AL049948 | Homo sapiens mRNA; cDNA | 6.60E−08 |
| | | | DKFZp564K0222 (from clone | |
| | | | DKFZp564K0222) | |
| 381 | 3556.E24.GZ43_507219 | Z57634 | H. sapiens CpG island DNA genomic | 8.70E−07 |
| | | | Msel fragment, clone 187e9, forward | |
| | | | read cpg187e9.ft1a | |
| 382 | 3556.F10.GZ43_506996 | AF025409 | Homo sapiens zinc transporter 4 (ZNT4) | 3.90E−34 |
| | | | mRNA, complete cds | |
| 383 | 3556.G15.GZ43_507077 | X15407 | Maize pseudo-Gpa2 pseudogene for | 3.40E−05 |
| | | | glyceraldehyde-3-phosphate | |
| | | | dehydrogenase subunit A | |
| 384 | 3556.H01.GZ43_506854 | AF269443 | Staphylococcus epidermidis strain SR1 | 3.00E−06 |
| | | | clone step.1003h04 genomic sequence | |
| 385 | 3556.H02.GZ43_506870 | U31465 | Kluyveromyces lactis telomerase RNA | 3.00E−06 |
| | | | component (TER1) gene, complete | |
| | | | sequence | |
| 386 | 3556.H12.GZ43_507030 | Z68886 | Human DNA sequence from cosmid | 1.70E−07 |
| | | | L21F12, Huntington's Disease Region, | |
| | | | chromosome 4p16.3 | |
| 387 | 3556.H20.GZ43_507158 | AB034628 | Equus caballus microsatellite TKY319, | 1.70E−07 |
| | | | TKY320 DNA | |
| 388 | 3556.I02.GZ43_506871 | AL390767 | Human DNA sequence from clone RP1- | 2.00E−06 |
| | | | 68P15 on chromosome 11p13-14.2 | |
| | | | Contains GSSs and ESTs. Contains part | |
| | | | of a novel gene, complete sequence | |
| | | | [Homo sapiens] | |
| 389 | 3556.I14.GZ43_507063 | U34042 | Mus musculus mammalian tolloid-like | 1.50E−05 |
| | | | protein mRNA, complete cds | |
| 390 | 3556.J05.GZ43_506920 | U31465 | Kluyveromyces lactis telomerase RNA | 2.00E−06 |
| | | | component (TER1) gene, complete | |
| | | | sequence | |
| 391 | 3556.J07.GZ43_506952 | AL359621 | Homo sapiens mRNA; cDNA | 2.00E−06 |
| | | | DKFZp434M1631 (from clone | |
| | | | DKFZp434M1631) | |
| 392 | 3556.J14.GZ43_507064 | M81830 | Human somatostatin receptor isoform 2 | 1.00E−06 |
| | | | (SSTR2) gene, complete cds | |
| 393 | 3556.J16.GZ43_507096 | Y15484 | Canis familiaris gene encoding retinal | 2.90E−08 |
| | | | guanylate cyclase E | |
| 394 | 3556.K04.GZ43_506905 | U88832 | Human groucho protein homolog (AES) | 8.00E−07 |
| | | | gene, exons 2-7 and complete cds | |
| 395 | 3556.K12.GZ43_507033 | AP001419 | Homo sapiens genomic DNA, | 1.00E−06 |
| | | | chromosome 21q22.2, clone: PAC24K9, | |
| | | | LB7T-ERG region, complete sequence | |
| 396 | 3556.K13.GZ43_507049 | AK023589 | Homo sapiens cDNA FLJ13527 fis, | 2.00E−06 |
| | | | clone PLACE1006076 | |
| 397 | 3556.K17.GZ43_507113 | X71634 | D. bifasciata P-Transposon | 3.00E−06 |
| 398 | 3556.L08.GZ43_506970 | X02367 | Glaucoma chattoni rDNA 3′ NTS | 8.20E−08 |
| 399 | 3556.L09.GZ43_506986 | AF154329 | Pisum sativum MAP kinase PsMAPK2 | 4.10E−07 |
| | | | (Mapk2) mRNA, complete cds | |
| 400 | 3556.L16.GZ43_507098 | AB041791 | Homo sapiens HSPDE10A gene for | 3.10E−08 |
| | | | phosphodiesterase 10A1 (PDE10A1), | |
| | | | exon 17 | |
| 401 | 3556.L23.GZ43_507210 | M23720 | Rat carboxypeptidase (CA2) gene, exon | 5.00E−06 |
| | | | 10 | |
| 402 | 3556.M02.GZ43_506875 | U91963 | Human tolloid-like protein (TLL) | 1.40E−05 |
| | | | mRNA, complete cds | |
| 403 | 3556.M11.GZ43_507019 | X16353 | R. rickettsii ompB gene for outer | 7.60E−05 |
| | | | membrane protein B | |
| 404 | 3556.M23.GZ43_507211 | X93496 | H. sapiens TRAP gene, 5′ flanking region | 5.60E−23 |
| 405 | 3556.N02.GZ43_506876 | U26458 | Snakehead retrovirus (SnRV), complete | 3.20E−05 |
| | | | genome | |
| 406 | 3556.N04.GZ43_506908 | L39064 | Homo sapiens interleukin 9 receptor | 4.00E−09 |
| | | | precursor (IL9R) gene, complete cds | |
| 407 | 3556.N05.GZ43_506924 | M63437 | Chicken KLG gene, complete cds | 2.00E−06 |
| 408 | 3556.N06.GZ43_506940 | AF327424 | Arabidopsis thaliana unknown protein | 2.00E−07 |
| | | | (T14P1.19/At2g45010) mRNA, partial | |
| | | | cds | |
| 409 | 3556.N21.GZ43_507180 | AB022157 | Mus musculus Cctd gene for chaperonin | 4.00E−06 |
| | | | containing TCP-1 delta subunit, | |
| | | | complete cds | |
| 410 | 3556.O08.GZ43_506973 | X00171 | Vibrio cholera toxin (ctx) operon DNA | 7.00E−06 |
| | | | sequence from strain 2125 | |
| 411 | 3556.O13.GZ43_507053 | U41106 | Caenorhabditis elegans cosmid W06A11 | 1.20E−05 |
| 412 | 3556.P07.GZ43_506958 | M15085 | T. brucei expressed copy of the ILTat 1.3 | 1.10E−07 |
| | | | variable surface glycoprotein gene, 5′ | |
| | | | flank | |
| 413 | 3559.A04.GZ43_507279 | AE006824 | Sulfolobus solfataricus section 183 of | 4.70E−05 |
| | | | 272 of the complete genome | |
| 414 | 3559.A20.GZ43_507535 | X71787 | A. thaliana AAP2 mRNA for amino acid | 2.00E−06 |
| | | | permease | |
| 415 | 3559.A24.GZ43_507599 | X56494 | H. sapiens M gene for M1-type and M2- | 1.80E−05 |
| | | | type pyruvate kinase | |
| 416 | 3559.B04.GZ43_507280 | AJ251550 | Homo sapiens partial AK155 gene for | 2.50E−05 |
| | | | AK155 protein, exons 1-3 and joined | |
| | | | CDS | |
| 417 | 3559.B06.GZ43_507312 | AF077344 | Homo sapiens cartilage-derived C-type | 5.80E−05 |
| | | | lectin (CLECSF1) gene, exons 1 and 2 | |
| 418 | 3559.B08.GZ43_507344 | D50552 | Xenopus laevis xSox12 mRNA for | 4.00E−07 |
| | | | XSOX12, complete cds | |
| 419 | 3559.B10.GZ43_507376 | L76259 | Homo sapiens PTS gene, complete cds | 9.00E−06 |
| 420 | 3559.B18.GZ43_507504 | M29109 | D. discoideum actin M6 gene, 5′ flank | 3.40E−07 |
| 421 | 3559.C06.GZ43_507313 | X99910 | C. carpio mRNA transcription factor, | 1.60E−05 |
| | | | ovx1 | |
| 422 | 3559.D21.GZ43_507554 | AK022877 | Homo sapiens cDNA FLJ12815 fis, | 2.00E−06 |
| | | | clone NT2RP2002546 | |
| 423 | 3559.E06.GZ43_507315 | U97408 | Caenorhabditis elegans cosmid F48A9 | 3.00E−06 |
| 424 | 3559.E09.GZ43_507363 | L40489 | Ureaplasma urealyticum UreA (ureA), | 3.00E−07 |
| | | | UreB (ureB), UreC (ureC), UreE (ureE), | |
| | | | UreF (ureF), and UreG (ureG) genes, | |
| | | | complete cds; UreD (ureD) gene, partial | |
| | | | cds; and unknown gene | |
| 425 | 3559.E20.GZ43_507539 | AF113521 | Zea mays putative transcription factor | 8.20E−08 |
| | | | mRNA sequence | |
| 426 | 3559.F07.GZ43_507332 | AF109377 | Mus musculus ldlBp (LDLB) mRNA, | 4.30E−05 |
| | | | complete cds | |
| 427 | 3559.F17.GZ43_507492 | U11292 | Human Ki nuclear autoantigen mRNA, | 6.40E−07 |
| | | | complete cds | |
| 428 | 3559.H09.GZ43_507366 | X13414 | Murine I gene for MHC class II(Ia) | 9.00E−06 |
| | | | associated invariant chain | |
| 429 | 3559.H22.GZ43_507574 | U61402 | Streptococcus thermophilus GalR (galR), | 1.00E−06 |
| | | | galactokinase (galK) and gal-1-P | |
| | | | uridylyltransferase (galT) genes, | |
| | | | complete cds | |
| 430 | 3559.H24.GZ43_507606 | U67594 | Methanococcus jannaschii section 136 of | 3.40E−05 |
| | | | 150 of the complete genome | |
| 431 | 3559.I05.GZ43_507303 | X97289 | S. salar genes encoding alpha-globin and | 7.00E−06 |
| | | | beta-globin, clone 6 | |
| 432 | 3559.J04.GZ43_507288 | L10709 | Human constitutive endothelial nitric | 8.90E−12 |
| | | | oxide synthase gene, exons 25 and 26 | |
| | | | and complete cds | |
| 433 | 3559.J20.GZ43_507544 | U67559 | Methanococcus jannaschii section 101 of | 5.70E−05 |
| | | | 150 of the complete genome | |
| 434 | 3559.K16.GZ43_507481 | Z48955 | D. virginiana partial LINE-1 repetitive | 2.40E−08 |
| | | | DNA and putative RT | |
| 435 | 3559.K17.GZ43_507497 | AC004497 | Homo sapiens chromosome 21, P1 clone | 4.00E−06 |
| | | | LBNL#6 (LBNL H10), complete | |
| | | | sequence | |
| 436 | 3559.L01.GZ43_507242 | X58774 | Herpesvirus saimiri sRNA1, sRNA2, | 1.00E−06 |
| | | | sRNA3 and sRNA4 genes for small | |
| | | | viral RNAs | |
| 437 | 3559.L14.GZ43_507450 | X67774 | C. upsaliensis (LMG 8854) 23S rRNA | 1.30E−05 |
| | | | gene | |
| 438 | 3559.L19.GZ43_507530 | Z57634 | H. sapiens CpG island DNA genomic | 7.70E−07 |
| | | | Mse1 fragment, clone 187e9, forward | |
| | | | read cpg187e9.ft1a | |
| 439 | 3559.M02.GZ43_507259 | AF042834 | Homo sapiens phosphodiesterase delta | 1.30E−05 |
| | | | subunit gene, exons 2, 3 and 4 | |
| 440 | 3559.M09.GZ43_507371 | U07628 | Caenorhabditis elegans N2 APX-1 (apx- | 2.00E−06 |
| | | | 1) mRNA, complete cds | |
| 441 | 3559.N05.GZ43_507308 | Z24259 | H. sapiens (D19S417) DNA segment | 3.70E−07 |
| | | | containing (CA) repeat; clone | |
| | | | AFM304zg1; single read | |
| 442 | 3559.N18.GZ43_507516 | S75829 | {dinucleotide repeats, microsatellite | 1.90E−07 |
| | | | marker} [Dryobalanops lanceolata, | |
| | | | Genomic, 230 nt] | |
| 443 | 3559.N21.GZ43_507564 | AL353948 | Homo sapiens mRNA; cDNA | 5.30E−07 |
| | | | DKFZp761P0114 (from clone | |
| | | | DKFZp761P0114) | |
| 444 | 3559.O01.GZ43_507245 | AL110269 | Homo sapiens mRNA; cDNA | 1.60E−17 |
| | | | DKFZp564A122 (from clone | |
| | | | DKFZp564A122); partial cds | |
| 445 | 3559.O05.GZ43_507309 | Y08695 | Clostridium tertium nanH gene | 7.40E−07 |
| 446 | 3559.O07.GZ43_507341 | AJ249489 | Xenopus laevis partial mRNA for | 5.40E−07 |
| | | | putative olfactory receptor (xb6 gene) | |
| 447 | 3559.O20.GZ43_507549 | X02886 | Human gene for T-cell receptor alpha | 2.00E−06 |
| | | | chain J region | |
| 448 | 3559.P10.GZ43_507390 | X66030 | Homo sapiens partial ufo gene encoding | 4.90E−07 |
| | | | tyrosine kinase receptor | |
| 449 | 3559.P15.GZ43_507470 | Z16777 | H. sapiens (D2S139) DNA segment | 4.00E−06 |
| | | | containing (CA) repeat; clone | |
| | | | AFM177xh4; single read | |
| 450 | 3559.P18.GZ43_507518 | AJ228072 | Nicotiana benthamiana DNA for Tnt1 | 2.80E−07 |
| | | | retrotransposable element, isolate ben15 | |
| 451 | 3559.P24.GZ43_507614 | U32372 | Rattus norvegicus tyrosine-ester | 4.90E−07 |
| | | | sulfotransferase mRNA, complete cds | |
| 452 | 3562.A01.GZ43_507615 | AE000496 | Escherichia coli K12 MG1655 section | 1.56E−04 |
| | | | 386 of 400 of the complete genome | |
| 453 | 3562.A15.GZ43_507839 | AF068289 | Homo sapiens HDCMD34P mRNA, | 6.60E−11 |
| | | | complete cds | |
| 454 | 3562.B22.GZ43_507952 | AK014534 | Mus musculus 0 day neonate skin | 1.10E−07 |
| | | | cDNA, RIKEN full-length enriched | |
| | | | library, clone: 4631424J17, full insert | |
| | | | sequence | |
| 455 | 3562.C23.GZ43_507969 | L01787 | Ascaris suum phosphoenolpyruvate | 3.70E−07 |
| | | | carboxykinase (PEPCK) gene, complete | |
| | | | cds | |
| 456 | 3562.D10.GZ43_507762 | X54061 | D. melanogaster mRNA coding for a | 6.60E−07 |
| | | | 205K microtubule-associated protein | |
| | | | (MAP) | |
| 457 | 3562.E01.GZ43_507619 | M29812 | Homo sapiens Ig H-chain V71-4 | 1.50E−05 |
| | | | (IGH@) gene, partial cds | |
| 458 | 3562.E03.GZ43_507651 | X03729 | Vaccinia virus late gene cluster from | 2.63E−04 |
| | | | central portion of genome containing the | |
| | | | L65 gene locus | |
| 459 | 3562.E12.GZ43_507795 | M29694 | B. licheniformis RNA polymerase sigma- | 1.60E−05 |
| | | | 30 factor (spo0H) gene, complete cds | |
| 460 | 3562.F19.GZ43_507908 | AE006216 | Pasteurella multocida PM70 section 183 | 2.40E−05 |
| | | | of 204 of the complete genome | |
| 461 | 3562.F20.GZ43_507924 | M91004 | Rabbit endothelial leukocyte adhesion | 2.00E−06 |
| | | | molecule I (ELAM1), complete cds | |
| 462 | 3562.G13.GZ43_507813 | X69818 | E. muelleri COLF1 gene for extracellular | 1.00E−06 |
| | | | matrix protein | |
| 463 | 3562.G19.GZ43_507909 | AK019034 | Mus musculus 10 day old male pancreas | 1.00E−05 |
| | | | cDNA, RIKEN full-length enriched | |
| | | | library, clone: 1810049K24, full insert | |
| | | | sequence | |
| 464 | 3562.H11.GZ43_507782 | AF206598 | Algyroides fitzingeri 12S ribosomal | 1.40E−07 |
| | | | RNA gene, partial sequence; tRNA-Val | |
| | | | gene, complete sequence; and 16S | |
| | | | ribosomal RNA gene, partial sequence; | |
| | | | mitochondrial genes for mitochondrial | |
| | | | products | |
| 465 | 3562.H12.GZ43_507798 | AK002041 | Homo sapiens cDNA FLJ11179 fis, | 5.30E−07 |
| | | | clone PLACE 1007450 | |
| 466 | 3562.I01.GZ43_507623 | S39048 | knob associated histidine-rich protein | 2.00E−06 |
| | | | KAHRP {5′region} [Plasmodium | |
| | | | falciparum, Genomic, 2215 nt] | |
| 467 | 3562.I02.GZ43_507639 | AF129501 | Buchnera aphidicola natural-host | 1.60E−07 |
| | | | Diuraphis noxia acetohydroxy acid | |
| | | | synthase large subunit (ilvI) and | |
| | | | acetohydroxy acid synthase small | |
| | | | subunit (ilvH) genes, complete cds; and | |
| | | | unknown genes | |
| 468 | 3562.I13.GZ43_507815 | M26049 | Yeast (S. cerevisiae) RAD9 protein | 4.00E−06 |
| | | | (required for cell cycle arrest during | |
| | | | DNA repair) gene, complete cds | |
| 469 | 3562.I15.GZ43_507847 | AF310880 | Barbatula barbatula microsatellite Bbar5 | 1.60E−07 |
| | | | sequence | |
| 470 | 3562.J09.GZ43_507752 | AF236642 | Calothrix parietina clone 102-2A 16S-23S | 3.30E−07 |
| | | | internal transcribed spacer, complete | |
| | | | sequence; and tRNA-Ile and tRNA-Ala | |
| | | | genes, complete sequence | |
| 471 | 3562.J13.GZ43_507816 | AC010728 | Homo sapiens BAC clone RP11-258E22 | 1.30E−05 |
| | | | from Y, complete sequence | |
| 472 | 3562.K04.GZ43_507673 | S79777 | {specific DNA probe for Plasmodium | 5.40E−07 |
| | | | vivax pARC 1153} [Plasmodium vivax, | |
| | | | host = human, Genomic, 665 nt] | |
| 473 | 3562.K08.GZ43_507737 | AJ403240 | M. musculus DNA for vimentin-binding | 2.00E−06 |
| | | | fragment VimE8 | |
| 474 | 3562.L12.GZ43_507802 | AE007840 | Clostridium acetobutylicum ATCC824 | 5.80E−07 |
| | | | section 328 of 356 of the complete | |
| | | | genome | |
| 475 | 3562.N24.GZ43_507996 | AF255609 | Homo sapiens high mobility group | 2.00E−07 |
| | | | protein HMG1 gene, exons 1 and 2, | |
| | | | partial cds | |
| 476 | 3562.O11.GZ43_507789 | M15027 | Human myelin proteolipid protein gene, | 1.00E−06 |
| | | | exon 2 | |
| 477 | 3562.O18.GZ43_507901 | AL050208 | Homo sapiens mRNA; cDNA | 2.40E−07 |
| | | | DKFZp586F2323 (from clone | |
| | | | DKFZp586F2323) | |
| 478 | 3562.O20.GZ43_507933 | AY020756 | Oryza sativa microsatellite MRG3081 | 4.90E−08 |
| | | | containing (TA)X13, genomic sequence | |
| 479 | 3562.P21.GZ43_507950 | AF036318 | Skeletonema costatum cyclin (CYCL) | 7.20E−07 |
| | | | gene, partial cds | |
| 480 | 3562.P23.GZ43_507982 | AF126719 | Plasmodium falciparum cAMP- | 3.00E−06 |
| | | | dependent protein kinase (pka) gene, | |
| | | | complete cds | |
| 481 | 3565.A23.GZ43_508351 | AL122065 | Homo sapiens mRNA; cDNA | 1.50E−07 |
| | | | DKFZp434N011 (from clone | |
| | | | DKFZp434N011) | |
| 482 | 3565.B05.GZ43_508064 | AF163325 | Trichoderma harzianum mitochondrial | 1.50E−07 |
| | | | plasmid pThr1, complete plasmid | |
| | | | sequence | |
| 483 | 3565.B13.GZ43_508192 | X62689 | T. retusa DNA for brachiopod cubitus- | 9.00E−06 |
| | | | interruptus dominant (ciD) homologue | |
| 484 | 3565.B14.GZ43_508208 | M29929 | Human insulin receptor (allele 1) gene, | 4.30E−12 |
| | | | exons 14, 15, 16 and 17 | |
| 485 | 3565.C04.GZ43_508049 | AE006183 | Pasteurella multocida PM70 section 150 | 2.00E−06 |
| | | | of 204 of the complete genome | |
| 486 | 3565.C06.GZ43_508081 | S79836 | SCPx/SCP2 = sterol carrier protein | 3.00E−06 |
| | | | x/sterol carrier protein 2 {promoter} | |
| | | | [human, Genomic, 3575 nt] | |
| 487 | 3565.C17.GZ43_508257 | L13937 | Bovine phospholipase C mRNA, | 3.00E−07 |
| | | | complete cds | |
| 488 | 3565.D14.GZ43_508210 | M37818 | Human keratin (psi-K-alpha) | 3.50E−08 |
| | | | pseudogene, exons 4, 5, 6, 7 and 8, and | |
| | | | keratin (psi-K-beta) pseudogene, | |
| | | | complete cds | |
| 489 | 3565.D17.GZ43_508258 | Z19005 | C. pasteurianum gene for ferredoxin | 1.00E−06 |
| 490 | 3565.D19.GZ43_508290 | AE007758 | Clostridium acetobutylicum ATCC824 | 3.00E−06 |
| | | | section 246 of 356 of the complete | |
| | | | genome | |
| 491 | 3565.E16.GZ43_508243 | L42813 | Protopterus dolloi complete | 2.49E−04 |
| | | | mitochondrial genome | |
| 492 | 3565.G07.GZ43_508101 | U97500 | Homo sapiens butyrophilin (BT3.3) | 1.30E−05 |
| | | | gene, exons 1-4 | |
| 493 | 3565.G09.GZ43_508133 | M95098 | Bos taurus lysozyme gene (cow 2), | 1.26E−04 |
| | | | complete cds | |
| 494 | 3565.G22.GZ43_508341 | AJ400873 | Homo sapiens partial GPLD1 gene for | 1.40E−09 |
| | | | glycosylphosphatidylinositol | |
| | | | phospholipase D, exons 15-20 | |
| 495 | 3565.H06.GZ43_508086 | U67465 | Methanococcus jannaschii section 7 of | 6.10E−07 |
| | | | 150 of the complete genome | |
| 496 | 3565.H10.GZ43_508150 | M15350 | Bacillus sp. strain 170 beta-lactamase | 5.70E−08 |
| | | | gene, complete cds | |
| 497 | 3565.H11.GZ43_508166 | AB044878 | Equus caballus DNA, microsatellite | 3.20E−09 |
| | | | TKY378 | |
| 498 | 3565.H15.GZ43_508230 | AL122122 | Homo sapiens mRNA; cDNA | 5.00E−06 |
| | | | DKFZp434L098 (from clone | |
| | | | DKFZp434L098) | |
| 499 | 3565.H23.GZ43_508358 | J05492 | E. coli cytochrome O ubiquinol oxidase | 1.00E−06 |
| | | | (cyoA, cyoB, cyoC, cyoD and cyoE | |
| | | | genes, complete cds | |
| 500 | 3565.H24.GZ43_508374 | AE001417 | Plasmodium falciparum chromosome 2, | 1.70E−10 |
| | | | section 54 of 73 of the complete | |
| | | | sequence | |
| 501 | 3565.K15.GZ43_508233 | AB062985 | Macaca fascicularis brain cDNA | 6.90E−105 |
| | | | clone: QmoA-10670, full insert sequence | |
| 502 | 3565.L22.GZ43_508346 | L81801 | Homo sapiens (subclone 1_a2 from P1 | 1.30E−05 |
| | | | H31) DNA sequence, complete sequence | |
| 503 | 3565.M15.GZ43_508235 | X08038 | Methanobacterium thermoautotrophicum | 1.10E−05 |
| | | | rpoT, rpoU, rpoV and rpoX genes for | |
| | | | RNA polymerase subunits A, B′, B″ and C | |
| 504 | 3565.M20.GZ43_508315 | Z93381 | Caenorhabditis elegans cosmid F28G4, | 1.20E−05 |
| | | | complete sequence | |
| 505 | 3565.N12.GZ43_508188 | M21573 | Salmon (S. salar) growth hormone gene, | 5.70E−05 |
| | | | complete cds | |
| 506 | 3565.N13.GZ43_508204 | AK001163 | Homo sapiens cDNA FLJ10301 fis, | 5.20E−08 |
| | | | clone NT2RM2000032 | |
| 507 | 3565.N19.GZ43_508300 | AF321321 | Homo sapiens dopamine transporter | 2.00E−06 |
| | | | (SLC6A3) gene, exon 15 and complete | |
| | | | cds | |
| 508 | 3565.O02.GZ43_508029 | X59773 | Pisum sativum mRNA for P protein, a | 1.30E−05 |
| | | | part of glycine cleavage complex | |
| 509 | 3565.O03.GZ43_508045 | Z27113 | H. sapiens gene for RNA polymerase II | 2.00E−15 |
| | | | subunit 14.4 kD | |
| 510 | 3565.O07.GZ43_508109 | X96607 | M. musculus IgH 3′ alpha enhancer DNA | 6.40E−05 |
| 511 | 3565.O15.GZ43_508237 | Z35484 | Thermoanaerobacter sp. ATCC53627 | 3.00E−06 |
| | | | cgtA gene | |
| 512 | 3565.P03.GZ43_508046 | U11292 | Human Ki nuclear autoantigen mRNA, | 6.40E−07 |
| | | | complete cds | |
| 513 | 3565.P09.GZ43_508142 | X56261 | Yeast PPH1 gene for protein | 1.00E−06 |
| | | | phosphatase 2A | |
| 514 | 3565.P22.GZ43_508350 | AE007790 | Clostridium acetobutylicum ATCC824 | 3.00E−06 |
| | | | section 278 of 356 of the complete | |
| | | | genome | |
| 515 | 3565.P24.GZ43_508382 | X61146 | N. tabacum NTP303 pollen specific | 2.70E−05 |
| | | | mRNA | |
| 516 | 3568.A10.GZ43_508545 | U46925 | Arabidopsis thaliana GTP-binding | 3.00E−06 |
| | | | protein ATGB2 mRNA, complete cds | |
| 517 | 3568.B02.GZ43_508418 | U83640 | Mus caroli Sp100 gene, exons 3 and 4 | 1.90E−08 |
| 518 | 3568.B05.GZ43_508466 | BC008293 | Homo sapiens, Similar to RIKEN cDNA | 3.20E−16 |
| | | | A430101B06 gene, clone MGC: 13017 | |
| | | | IMAGE: 3537789, mRNA, complete cds | |
| 519 | 3568.C22.GZ43_508739 | AF280797 | Homo sapiens NPC-related protein | 1.00E−06 |
| | | | NAG73 mRNA, complete cds | |
| 520 | 3568.D23.GZ43_508756 | AK022922 | Homo sapiens cDNA FLJ12860 fis, | 8.00E−06 |
| | | | clone NT2RP2003559 | |
| 521 | 3568.E17.GZ43_508661 | AF068294 | Homo sapiens HDCMB45P mRNA, | 5.30E−09 |
| | | | partial cds | |
| 522 | 3568.E20.GZ43_508709 | AE006417 | Lactococcus lactis subsp. lactis IL1403 | 1.10E−05 |
| | | | section 179 of 218 of the complete | |
| | | | genome | |
| 523 | 3568.F06.GZ43_508486 | U52198 | Vibrio anguillarum flagellin E (flaE), | 2.20E−05 |
| | | | flagellin D (flaD), and flagellin B (flaB) | |
| | | | genes, complete cds, and (flaG) gene, | |
| | | | partial cds | |
| 524 | 3568.F07.GZ43_508502 | Z23599 | H. sapiens (D13S263) DNA segment | 1.90E−08 |
| | | | containing (CA) repeat; clone | |
| | | | AFM210yg11; single read | |
| 525 | 3568.F11.GZ43_508566 | AE007525 | Clostridium acetobutylicum ATCC824 | 4.20E−07 |
| | | | section 13 of 356 of the complete | |
| | | | genome | |
| 526 | 3568.F12.GZ43_508582 | D50416 | Mouse mRNA for AREC3, complete cds | 1.90E−05 |
| 527 | 3568.F22.GZ43_508742 | AF025900 | Histrionicus histrionicus CA | 7.80E−07 |
| | | | dinucleotide repeat locus Hhimicro1 | |
| 528 | 3568.G10.GZ43_508551 | U66074 | Tritrichomonas foetus putative | 9.70E−07 |
| | | | superoxide dismutase 2 (SOD2) gene, | |
| | | | complete cds | |
| 529 | 3568.G12.GZ43_508583 | AB062941 | Macaca fascicularis brain cDNA | 9.50E−47 |
| | | | clone: QflA-14927, full insert sequence | |
| 530 | 3568.G24.GZ43_508775 | L27221 | Giardia intestinalis pyruvate:flavodoxin | 3.20E−05 |
| | | | oxidoreductase and flanking genes | |
| 531 | 3568.H20.GZ43_508712 | X75887 | B. taurus Brevican mRNA | 4.70E−05 |
| 532 | 3568.J10.GZ43_508554 | AF194829 | Tetragonia tetragonioides NADH | 2.00E−06 |
| | | | dehydrogenase (ndhF) gene, partial cds; | |
| | | | chloroplast gene for chloroplast product | |
| 533 | 3568.J22.GZ43_508746 | Y11031 | C. coli pldA gene | 1.00E−06 |
| 534 | 3568.K01.GZ43_508411 | AL137751 | Homo sapiens mRNA; cDNA | 3.00E−06 |
| | | | DKFZp434I0812 (from clone | |
| | | | DKFZp434I0812); partial cds | |
| 535 | 3568.K04.GZ43_508459 | Z82295 | R. prowazekii genomic DNA fragment | 7.20E−08 |
| | | | (clone A153F) | |
| 536 | 3568.L04.GZ43_508460 | AL050105 | Homo sapiens mRNA; cDNA | 1.00E−05 |
| | | | DKFZp586H0519 (from clone | |
| | | | DKFZp586H0519); partial cds | |
| 537 | 3568.M03.GZ43_508445 | L76259 | Homo sapiens PTS gene, complete cds | 8.00E−06 |
| 538 | 3568.M13.GZ43_508605 | X61218 | M. musculus cervicolor (strain CRP) | 3.10E−09 |
| | | | Tcp-1 gene for t-complex polypeptide 1, | |
| | | | exons 8-10 | |
| 539 | 3568.N11.GZ43_508574 | AL079296 | Homo sapiens mRNA full length insert | 2.00E−06 |
| | | | cDNA clone EUROIMAGE 609395 | |
| 540 | 3568.O17.GZ43_508671 | AF078848 | Homo sapiens BUP mRNA, complete | 9.50E−09 |
| | | | cds | |
| 541 | 3568.P04.GZ43_508464 | AB041548 | Mus musculus brain cDNA, clone | 5.00E−06 |
| | | | MNCb-3816, similar to AF171875 g1- | |
| | | | related zinc finger protein (Mus | |
| | | | musculus) | |
| 542 | 3568.P18.GZ43_508688 | AL358951 | Human DNA sequence from clone RP3- | 3.00E−07 |
| | | | 456L16 on chromosome 6, complete | |
| | | | sequence [Homo sapiens] | |
| 543 | 3568.P19.GZ43_508704 | U43542 | Nicotiana tabacum diphenol oxidase | 2.00E−06 |
| | | | mRNA, complete cds | |
| 544 | 3571.A04.GZ43_508833 | AF017116 | Homo sapiens type-2 phosphatidic acid | 2.40E−07 |
| | | | phosphohydrolase (PAP2) mRNA, | |
| | | | complete cds | |
| 545 | 3571.A07.GZ43_508881 | L81867 | Homo sapiens (subclone 1_a8 from P1 | 9.00E−06 |
| | | | H54) DNA sequence, complete sequence | |
| 546 | 3571.A08.GZ43_508897 | X85041 | H. sapiens PE5L gene ALU repeat region | 2.00E−06 |
| 547 | 3571.A11.GZ43_508945 | U19361 | Petromyzon marinus neurofilament | 4.70E−08 |
| | | | subunit NF-180 mRNA, complete cds | |
| 548 | 3571.A14.GZ43_508993 | AL022342 | Human DNA sequence from clone RP1- | 7.00E−05 |
| | | | 29M10 on chromosome 20, complete | |
| | | | sequence [Homo sapiens] | |
| 549 | 3571.A22.GZ43_509121 | U09448 | Vaucheria bursata protein synthesis | 7.20E−07 |
| | | | elongation factor Tu (tufA) gene, | |
| | | | chloroplast gene encoding chloroplast | |
| | | | protein, partial cds | |
| 550 | 3571.B13.GZ43_508978 | AE002555 | Neisseria meningitidis serogroup B strain | 4.40E−05 |
| | | | MC58 section 197 of 206 of the | |
| | | | complete genome | |
| 551 | 3571.B22.GZ43_509122 | AE002555 | Neisseria meningitidis serogroup B strain | 4.50E−05 |
| | | | MC58 section 197 of 206 of the | |
| | | | complete genome | |
| 552 | 3571.C08.GZ43_508899 | AJ010154 | Saguinus oedipus msp-E1 gene | 1.10E−17 |
| 553 | 3571.D04.GZ43_508836 | AF125460 | Caenorhabditis elegans cosmid Y9D1A | 3.60E−07 |
| 554 | 3571.D07.GZ43_508884 | U51654 | Barbus barbus × Barbus meridionalis | 8.72E−02 |
| | | | microsatellite clone no. 37 | |
| 555 | 3571.E02.GZ43_508805 | AF329081 | Bos taurus AMP-activated protein kinase | 4.40E−33 |
| | | | gamma-1 (PRKAG1) gene, partial cds | |
| 556 | 3571.E10.GZ43_508933 | M96068 | Madagascar periwinkle | 3.30E−08 |
| | | | hydroxymethylglutaryl-CoA reductase | |
| | | | (HMGR) mRNA, complete cds | |
| 557 | 3571.E16.GZ43_509029 | AE006429 | Lactococcus lactis subsp. lactis IL1403 | 1.30E−05 |
| | | | section 191 of 218 of the complete | |
| | | | genome | |
| 558 | 3571.F06.GZ43_508870 | AL137296 | Homo sapiens mRNA; cDNA | 4.40E−07 |
| | | | DKFZp434M0416 (from clone | |
| | | | DKFZp434M0416) | |
| 559 | 3571.F16.GZ43_509030 | M58478 | Human cystic fibrosis transmembrane | 6.30E−05 |
| | | | conductance regulator gene, 5′ end | |
| 560 | 3571.F23.GZ43_509142 | AF038397 | Mus musculus glutaminase (Gls) gene, | 4.70E−08 |
| | | | partial 3′ sequence | |
| 561 | 3571.G22.GZ43_509127 | M80596 | Saccharomyces cerevisiae VAC1 gene | 7.00E−06 |
| | | | (required for vacuole inheritance and | |
| | | | vacuole protein sorting), complete cds | |
| 562 | 3571.G24.GZ43_509159 | Z75330 | H. sapiens mRNA for nuclear protein SA-1 | 1.00E−46 |
| 563 | 3571.H01.GZ43_508792 | U71144 | Influenza A virus H3N2 A/Akita/1/94 | 1.90E−05 |
| | | | nucleoprotein (NP) gene, complete cds | |
| 564 | 3571.H10.GZ43_508936 | AF038564 | Homo sapiens atrophin-1 interacting | 6.60E−53 |
| | | | protein 4 (AIP4) mRNA, partial cds | |
| 565 | 3571.H12.GZ43_508968 | K00131 | mouse b2 repeat sequence from clone | 3.00E−08 |
| | | | mm61 | |
| 566 | 3571.H16.GZ43_509032 | AF179564 | Homo sapiens GTF2I-like sequence | 1.20E−23 |
| | | | within duplicated segment of Williams | |
| | | | syndrome region | |
| 567 | 3571.H18.GZ43_509064 | AE000331 | Escherichia coli K12 MG1655 section | 1.45E−04 |
| | | | 221 of 400 of the complete genome | |
| 568 | 3571.I11.GZ43_508953 | U20661 | Dictyostelium discoideum unknown | 9.00E−06 |
| | | | internal repeat protein gene, complete | |
| | | | cds, and unknown orf1, orf2 and orf3 | |
| | | | genes, partial cds | |
| 569 | 3571.J07.GZ43_508890 | M58478 | Human cystic fibrosis transmembrane | 6.40E−05 |
| | | | conductance regulator gene, 5′ end | |
| 570 | 3571.J08.GZ43_508906 | AK021312 | Mus musculus 13 days embryo stomach | 3.60E−08 |
| | | | cDNA, RIKEN full-length enriched | |
| | | | library, clone: D530039A21, full insert | |
| | | | sequence | |
| 571 | 3571.J09.GZ43_508922 | X66483 | D. discoideum gp80 gene | 8.90E−07 |
| 572 | 3571.J14.GZ43_509002 | L77119 | Methanococcus jannaschii small extra- | 1.40E−05 |
| | | | chromosomal element, complete | |
| | | | sequence.˜ | |
| 573 | 3571.L01.GZ43_508796 | AK005500 | Mus musculus adult female placenta | 6.00E−06 |
| | | | cDNA, RIKEN full-length enriched | |
| | | | library, clone: 1600019O04, full insert | |
| | | | sequence | |
| 574 | 3571.M17.GZ43_509053 | AF085681 | Mus musculus tubby like protein 1 | 5.00E−06 |
| | | | (Tulp1) mRNA, complete cds | |
| 575 | 3571.M19.GZ43_509085 | D10487 | B. thermoglucosidasius gene for oligo- | 9.00E−06 |
| | | | 1,6-glucosidase | |
| 576 | 3571.M24.GZ43_509165 | M97680 | Bluetongue virus type 2 genomic RNA | 2.00E−06 |
| | | | sequence | |
| 577 | 3571.N09.GZ43_508926 | X86100 | R. norvegicus BSP gene | 3.40E−07 |
| 578 | 3571.N14.GZ43_509006 | D32007 | Mouse mRNA for a homlogue of | 1.20E−08 |
| | | | human CBFA2T1(Mtg8a), complete cds | |
| 579 | 3571.N17.GZ43_509054 | Z68755 | Human DNA sequence from cosmid | 1.70E−10 |
| | | | L118D5, Huntington's Disease Region, | |
| | | | chromosome 4p16.3 | |
| 580 | 3571.N22.GZ43_509134 | D00326 | Porcine rotavirus (strain Gottfried), VP6 | 1.00E−06 |
| | | | gene, complete cds | |
| 581 | 3571.O08.GZ43_508911 | X66483 | D. discoideum gp80 gene | 8.20E−07 |
| 582 | 3574.A20.GZ43_509473 | AJ271814 | Drosophila melanogaster mRNA for | 1.70E−07 |
| | | | meso18E protein | |
| 583 | 3574.B01.GZ43_509170 | U93261 | Homo sapiens DESP4P1 pseudogene | 1.00E−06 |
| | | | sequence | |
| 584 | 3574.B04.GZ43_509218 | Y08207 | C. elaphus mitochondrial tRNA-Thr, | 1.40E−14 |
| | | | tRNA-Pro and tRNA-Phe genes | |
| 585 | 3574.B10.GZ43_509314 | AL161991 | Homo sapiens mRNA; cDNA | 3.00E−06 |
| | | | DKFZp761C169 (from clone | |
| | | | DKFZp761C169); partial cds | |
| 586 | 3574.B14.GZ43_509378 | D79208 | Apis mellifera mRNA for alpha- | 7.00E−06 |
| | | | glucosidase, complete cds | |
| 587 | 3574.B24.GZ43_509538 | AE007758 | Clostridium acetobutylicum ATCC824 | 3.00E−06 |
| | | | section 246 of 356 of the complete | |
| | | | genome | |
| 588 | 3574.C09.GZ43_509299 | AF057708 | Populus balsamifera subsp. trichocarpa | 2.40E−07 |
| | | | PTD protein (PTD) gene, complete cds | |
| 589 | 3574.C10.GZ43_509315 | AE005602 | Escherichia coli O157:H7 EDL933 | 9.70E−05 |
| | | | genome, contig 3 of 3, section 221 of | |
| | | | 290 | |
| 590 | 3574.C12.GZ43_509347 | AJ223633 | Enterococcus faecium genes encoding | 9.50E−07 |
| | | | enterocin L50A and enterocin L50B plus | |
| | | | 5′ and 3′ flanking regions | |
| 591 | 3574.C14.GZ43_509379 | X99710 | L. lactis ORF, genes homologous to vsf-1 | 4.00E−06 |
| | | | and pepF2 and gene encoding protein | |
| | | | homologous to methyltransferase | |
| 592 | 3574.C16.GZ43_509411 | AF092920 | Chlorohydra viridissima head-activator | 3.00E−07 |
| | | | binding protein precursor (HAB) mRNA, | |
| | | | complete cds | |
| 593 | 3574.C23.GZ43_509523 | AB047856 | Oryza sativa Ub-CEP52-2 gene for | 5.00E−08 |
| | | | ubiquitin fused to ribosomal protein L40, | |
| | | | complete cds | |
| 594 | 3574.D02.GZ43_509188 | AB060225 | Macaca fascicularis brain cDNA | 570E−07 |
| | | | clone: QflA-14955, full insert sequence | |
| 595 | 3574.D12.GZ43_509348 | M58478 | Human cystic fibrosis transmembrane | 6.00E−05 |
| | | | conductance regulator gene, 5′ end | |
| 596 | 3574.E02.GZ43_509189 | L37347 | Human integral membrane protein | 2.00E−06 |
| | | | (Nramp2) mRNA, partial | |
| 597 | 3574.E03.GZ43_509205 | X05817 | Bovine papillomavirus type 4 (BPV-4) | 6.00E−06 |
| | | | genome | |
| 598 | 3574.E14.GZ43_509381 | U67507 | Methanococcus jannaschii section 49 of | 3.40E−05 |
| | | | 150 of the complete genome | |
| 599 | 3574.F10.GZ43_509318 | M24376 | Mouse zinc finger protein (krox-20) | 3.80E−08 |
| | | | gene, exon 1 | |
| 600 | 3574.F18.GZ43_509446 | AF184170 | Sparus aurata elongation factor 1-alpha | 3.40E−07 |
| | | | (EF1-alpha) mRNA, complete cds | |
| 601 | 3574.F23.GZ43_509526 | Z29486 | R. norvegicus (Sprague Dawley) mRNA | 9.00E−06 |
| | | | for AMP-activated protein kinase | |
| 602 | 3574.G07.GZ43_509271 | AF064079 | Plasmodium gallinaceum endochitinase | 1.40E−07 |
| | | | precursor, mRNA, complete cds | |
| 603 | 3574.G11.GZ43_509335 | AF032872 | Rattus norvegicus potassium channel | 7.40E−07 |
| | | | regulatory protein KChAP mRNA, | |
| | | | complete cds | |
| 604 | 3574.H07.GZ43_509272 | J04718 | Human proliferating cell nuclear antigen | 3.10E−07 |
| | | | (PCNA) gene, complete cds | |
| 605 | 3574.I02.GZ43_509193 | AF200361 | Rattus norvegicus cytochrome P450 4F1 | 1.50E−05 |
| | | | (Cyp4F1) gene, complete cds | |
| 606 | 3574.I07.GZ43_509273 | M29688 | S. cerevisiae PMS1 gene encoding DNA | 1.20E−08 |
| | | | mismatch repair protein, complete cds | |
| 607 | 3574.J11.GZ43_509338 | Z24104 | H. sapiens (D12S338) DNA segment | 3.20E−07 |
| | | | containing (CA) repeat; clone | |
| | | | AFM291wd9; single read | |
| 608 | 3574.J14.GZ43_509386 | AB008430 | Homo sapiens mRNA for CDEP, | 4.70E−05 |
| | | | complete cds | |
| 609 | 3574.J23.GZ43_509530 | AP000384 | Arabidopsis thaliana genomic DNA, | 7.10E−07 |
| | | | chromosome 3, P1 clone: MCE21 | |
| 610 | 3574.K12.GZ43_509355 | AB031814 | Mus musculus oatp2 mRNA for organic | 1.50E−05 |
| | | | anion transporting polypeptide 2, | |
| | | | complete cds | |
| 611 | 3574.K20.GZ43_509483 | AF126719 | Plasmodium falciparum cAMP- | 3.00E−06 |
| | | | dependent protein kinase (pka) gene, | |
| | | | complete cds | |
| 612 | 3574.L07.GZ43_509276 | U53400 | Rattus norvegicus chromosome 10 | 8.94E−02 |
| | | | microsatellite sequence D10Mco21 | |
| 613 | 3574.M03.GZ43_509213 | AB000404 | Rice grassy stunt virus genomic RNA6 | 5.60E−07 |
| | | | for 20.6K major nonstructural protein | |
| | | | and 36.4K protein, complete cds | |
| 614 | 3574.M23.GZ43_509533 | U18056 | Lycopersicon esculentum 1-amino- | 3.40E−07 |
| | | | cyclopropane-1-carboxylate synthase | |
| | | | (LE-ACS1A) gene, complete cds | |
| 615 | 3574.N04.GZ43_509230 | L48479 | Homo sapiens (subclone 6_h1 from P1 | 3.30E−09 |
| | | | H21) DNA sequence | |
| 616 | 3574.N10.GZ43_509326 | M58150 | Bovine lactoperoxidase (LPO) mRNA, | 3.60E−05 |
| | | | complete cds | |
| 617 | 3574.N12.GZ43_509358 | AF182950 | Homo sapiens HEX (HEX) gene, partial | 9.00E−06 |
| | | | cds and 5′ flanking sequence | |
| 618 | 3574.N20.GZ43_509486 | AE006904 | Sulfolobus solfataricus section 263 of | 3.00E−06 |
| | | | 272 of the complete genome | |
| 619 | 3574.P07.GZ43_509280 | U60232 | Homo sapiens cysteine dioxygenase | 6.30E−08 |
| | | | (CDO-1) gene, 5′ flanking region and | |
| | | | exons 1 and 2 | |
| 620 | 3574.P17.GZ43_509440 | AC002218 | Homo sapiens (subclone 2_c1 from P1 | 5.30E−08 |
| | | | H43) DNA sequence, complete sequence | |
| 621 | 3577.A06.GZ43_509633 | U28328 | Bos taurus dinucleotide repeat RM154, | 3.40E−27 |
| | | | tandem repeat region | |
| 622 | 3577.A18.GZ43_509825 | X58774 | Herpesvirus saimiri sRNA1, sRNA2, | 1.00E−06 |
| | | | sRNA3 and sRNA4 genes for small | |
| | | | viral RNAs | |
| 623 | 3577.B12.GZ43_509730 | BC008400 | Homo sapiens, postmeiotic segregation | 2.50E−05 |
| | | | increased (S. cerevisiae) 2, clone | |
| | | | IMAGE: 4273792, mRNA | |
| 624 | 3577.B15.GZ43_509778 | M61127 | Drosophila melanogaster GTP-binding | 1.10E−05 |
| | | | protein (arf-like) gene, complete cds | |
| 625 | 3577.B19.GZ43_509842 | AF135526 | Homo sapiens clone MINT26 colon | 1.00E−06 |
| | | | cancer differentially methylated CpG | |
| | | | island genomic sequence | |
| 626 | 3577.E19.GZ43_509845 | AF063864 | Schizosaccharomyces pombe essential | 1.00E−06 |
| | | | nuclear protein Mcm3p (mcm3+) gene, | |
| | | | complete cds | |
| 627 | 3577.F02.GZ43_509574 | U37434 | Danio rerio L-isoaspartate (D-aspartate) | 5.10E−08 |
| | | | O-methyltransferase (PCMT) mRNA, | |
| | | | complete cds | |
| 628 | 3577.G07.GZ43_509655 | AF001893 | Human MEN1 region clone epsilon/beta | 3.00E−06 |
| | | | mRNA, 3′ fragment | |
| 629 | 3577.G13.GZ43_509751 | M83821 | Xenopus laevis mucin B.1 consensus | 2.10E−07 |
| | | | repeat mRNA | |
| 630 | 3577.H06.GZ43_509640 | AK007565 | Mus musculus 10 day old male pancreas | 8.00E−07 |
| | | | cDNA, RIKEN full-length enriched | |
| | | | library, clone: 1810020K22, full insert | |
| | | | sequence | |
| 631 | 3577.H08.GZ43_509672 | L81912 | Homo sapiens (subclone 2_g5 from PAC | 2.40E−07 |
| | | | H74) DNA sequence, complete sequence | |
| 632 | 3577.H18.GZ43_509832 | AL157461 | Homo sapiens mRNA; cDNA | 4.00E−06 |
| | | | DKFZp434K152 (from clone | |
| | | | DKFZp434K152) | |
| 633 | 3577.I01.GZ43_509561 | U35006 | Carcharhinus plumbeus Ig lambda light | 2.00E−06 |
| | | | chain gene, complete cds | |
| 634 | 3577.I17.GZ43_509817 | AF157252 | Gongronella butleri translation | 1.00E−06 |
| | | | elongation factor 1-alpha (EF-1alpha) | |
| | | | gene, partial cds | |
| 635 | 3577.J04.GZ43_509610 | AF338249 | Sus scrofa thyroid-stimulating hormone | 2.00E−06 |
| | | | receptor mRNA, complete cds | |
| 636 | 3577.K06.GZ43_509643 | AB000264 | Bacillus firmus DNA for beta-amylase, | 5.00E−07 |
| | | | partial cds | |
| 637 | 3577.K14.GZ43_509771 | X15441 | Aspergillus nidulans mitochondrial ndhC | 1.00E−06 |
| | | | and oxiB genes for NADH | |
| | | | dehydrogenase subunit 3 and cytochrome | |
| | | | oxidase subunit II | |
| 638 | 3577.K23.GZ43_509915 | X52952 | Rat mRNA for c-mos | 3.00E−06 |
| 639 | 3577.L10.GZ43_509708 | X60578 | Hepatitis C genomic RNA for putative | 3.70E−07 |
| | | | envelope protein (RE56 isolate) | |
| 640 | 3577.N10.GZ43_509710 | Z75121 | S. cerevisiae chromosome XV reading | 4.50E−09 |
| | | | frame ORF YOR213c | |
| 641 | 3577.N14.GZ43_509774 | M90058 | Human serglycin gene, exons 1, 2, and 3 | 5.00E−06 |
| 642 | 3577.O17.GZ43_509823 | L19141 | Lupinus albus L-asparaginase gene, | 9.10E−08 |
| | | | complete cds | |
| 643 | 3577.O22.GZ43_509903 | AL031008 | Human DNA sequence from clone | 5.60E−08 |
| | | | 360A4 on chromosome 16. Contains | |
| | | | ESTs, complete sequence [Homo | |
| | | | sapiens] | |
| 644 | 3577.P02.GZ43_509584 | AK006176 | Mus musculus adult male testis cDNA, | 4.60E−08 |
| | | | RIKEN full-length enriched library, | |
| | | | clone: 1700020M10, full insert sequence | |
| 645 | 3577.P07.GZ43_509664 | U05822 | Human proto-oncogene BCL3 gene, | 2.40E−14 |
| | | | exon 2 | |
| 646 | 3577.P23.GZ43_509920 | AJ010341 | Homo sapiens PISSLRE gene, exons 1, | 1.00E−11 |
| | | | 2, and 3 and joined CDS | |
| 647 | 3580.A04.GZ43_509985 | AJ010213 | Mus musculus beta-dystrobrevin gene, | 8.20E−07 |
| | | | exon 10 | |
| 648 | 3580.A09.GZ43_510065 | AB037862 | Homo sapiens mRNA for KIAA1441 | 6.30E−15 |
| | | | protein, partial cds | |
| 649 | 3580.A13.GZ43_510129 | U17832 | Symploce pallens mitochondrion 16S | 7.80E−07 |
| | | | ribosomal RNA, partial sequence | |
| 650 | 3580.A14.GZ43_510145 | X89414 | A. thaliana DNA for pyrroline-5- | 6.00E−06 |
| | | | carboxylase synthetase gene | |
| 651 | 3580.B01.GZ43_509938 | U67487 | Methanococcus jannaschii section 29 of | 9.00E−05 |
| | | | 150 of the complete genome | |
| 652 | 3580.C01.GZ43_509939 | X14898 | Hamster p7 preinsertion DNA | 2.00E−06 |
| 653 | 3580.C03.GZ43_509971 | X76302 | H. sapiens RY-1 mRNA for putative | 3.70E−07 |
| | | | nucleic acid binding protein | |
| 654 | 3580.C05.GZ43_510003 | Z22923 | M. musculus alpha2 (IX) collagen gene, | 1.60E−05 |
| | | | complete CDS | |
| 655 | 3580.D07.GZ43_510036 | AB062941 | Macaca fascicularis brain cDNA | 9.80E−22 |
| | | | clone: QflA-14927, full insert sequence | |
| 656 | 3580.D22.GZ43_510276 | M84136 | Flaveria chloraefolia flavonol 4′- | 4.00E−06 |
| | | | sulfotransferase mRNA, complete cds | |
| 657 | 3580.E02.GZ43_509957 | AE001002 | Archaeoglobus fulgidus section 105 of | 3.90E−05 |
| | | | 172 of the complete genome | |
| 658 | 3580.E08.GZ43_510053 | U48431 | Drosophila pseudoobscura alpha- | 3.00E−06 |
| | | | amylase (Amy3) pseudogene, complete | |
| | | | cds | |
| 659 | 3580.E10.GZ43_510085 | Z64717 | H. sapiens CpG island DNA genomic | 9.60E−19 |
| | | | Mse1 fragment, clone 161e9, forward | |
| | | | read cpg161e9.ft1a | |
| 660 | 3580.E19.GZ43_510229 | M64984 | Candida tropicalis open reading frame | 2.00E−06 |
| | | | DNA sequence | |
| 661 | 3580.E21.GZ43_510261 | M84136 | Flaveria chloraefolia flavonol 4′- | 5.00E−06 |
| | | | sulfotransferase mRNA, complete cds | |
| 662 | 3580.E23.GZ43_510293 | AB033570 | Eptatretus burgeri hgPTPR5a mRNA, | 2.00E−06 |
| | | | partial cds | |
| 663 | 3580.G03.GZ43_509975 | Y14277 | Drosophila melanogaster mRNA for | 1.10E−05 |
| | | | nuclear protein SA | |
| 664 | 3580.G13.GZ43_510135 | AK018491 | Mus musculus adult male colon cDNA, | 4.40E−08 |
| | | | RIKEN full-length enriched library, | |
| | | | clone: 9030408N04, full insert sequence | |
| 665 | 3580.G14.GZ43_510151 | AF142660 | Lama glama microsatellite LCA90 | 2.60E−07 |
| | | | sequence | |
| 666 | 3580.G18.GZ43_510215 | D86226 | Spinacia oleracea DNA for nitrate | 2.60E−05 |
| | | | reductase, complete cds | |
| 667 | 3580.G19.GZ43_510231 | U60502 | Glycine max actin (Soy119) gene, partial | 7.00E−06 |
| | | | cds | |
| 668 | 3580.G20.GZ43_510247 | D38524 | Human mRNA for 5′-nucleotidase | 4.80E−11 |
| 669 | 3580.G24.GZ43_510311 | AF084480 | Mus musculus Williams-Beuren | 5.00E−06 |
| | | | syndrome deletion transcript 9 homolog | |
| | | | (Wbscr9) mRNA, complete cds | |
| 670 | 3580.H12.GZ43_510120 | X78423 | D. carota (Queen Anne's Lace) Inv*Dc3 | 4.00E−06 |
| | | | gene, 4444 bp | |
| 671 | 3580.H16.GZ43_510184 | Y13786 | Homo sapiens mRNA for meltrin- | 4.50E−10 |
| | | | beta/ADAM 19 homologue | |
| 672 | 3580.H22.GZ43_510280 | X62578 | C. caldarium plastid genes ompR′, psbD, | 2.50E−05 |
| | | | psbC, rps16 and groEL | |
| 673 | 3580.I06.GZ43_510025 | X51344 | Spiroplasma virus (SpV1-R8A2 B) | 4.70E−07 |
| | | | complete genome | |
| 674 | 3580.I08.GZ43_510057 | X02761 | Human mRNA for fibronectin (FN | 1.02E−04 |
| | | | precursor) | |
| 675 | 3580.I18.GZ43_510217 | BC007856 | Homo sapiens, clone MGC: 14337 | 2.60E−10 |
| | | | IMAGE: 4298428, mRNA, complete cds | |
| 676 | 3580.J10.GZ43_510090 | AF068206 | Rangifer tarandus microsatellite | 4.40E−11 |
| | | | NVHRT16 sequence | |
| 677 | 3580.J12.GZ43_510122 | AE008323 | Agrobacterium tumefaciens strain C58 | 9.30E−05 |
| | | | linear chromosome, section 127 of 187 | |
| | | | of the complete sequence | |
| 678 | 3580.J18.GZ43_510218 | AF222689 | Homo sapiens protein arginine N- | 1.50E−05 |
| | | | methyltransferase 1 (HRMT1L2) gene, | |
| | | | complete cds, alternatively spliced | |
| 679 | 3580.J20.GZ43_510250 | M31651 | Homo sapiens sex hormone-binding | 3.80E−07 |
| | | | globulin (SHBG) gene, complete cds | |
| 680 | 3580.J21.GZ43_510266 | AB054062 | Pagrus major lpl mRNA for lipoprotein | 3.00E−06 |
| | | | lipase, complete cds | |
| 681 | 3580.K03.GZ43_509979 | AE007607 | Clostridium acetobutylicum ATCC824 | 5.00E−05 |
| | | | section 95 of 356 of the complete | |
| | | | genome | |
| 682 | 3580.K05.GZ43_510011 | Z15027 | H. sapiens HLA class III DNA | 3.70E−08 |
| 683 | 3580.K21.GZ43_510267 | AF135826 | Mus musculus neuronal nitric oxide | 2.20E−09 |
| | | | synthase (NOS-I) gene, exon 1c and 5′- | |
| | | | flanking sequence | |
| 684 | 3580.L09.GZ43_510076 | AL049333 | Homo sapiens mRNA; cDNA | 3.40E−13 |
| | | | DKFZp564M116 (from clone | |
| | | | DKFZp564M116) | |
| 685 | 3580.L10.GZ43_510092 | AF278587 | Borrelia burgdorferi strain BC-1 outer | 2.00E−06 |
| | | | surface protein C (ospC) gene, partial | |
| | | | cds | |
| 686 | 3580.L12.GZ43_510124 | D14664 | Human mRNA for KIAA0022 gene, | 1.10E−05 |
| | | | complete cds | |
| 687 | 3580.L13.GZ43_510140 | K02269 | Human ERV3 (endogenous retrovirus 3) | 3.30E−07 |
| | | | gag gene | |
| 688 | 3580.L17.GZ43_510204 | U60232 | Homo sapiens cysteine dioxygenase | 2.00E−07 |
| | | | (CDO-1) gene, 5′ flanking region and | |
| | | | exons 1 and 2 | |
| 689 | 3580.M01.GZ43_509949 | U53400 | Rattus norvegicus chromosome 10 | 4.54E−01 |
| | | | microsatellite sequence D10Mco21 | |
| 690 | 3580.M16.GZ43_510189 | AE006406 | Lactococcus lactis subsp. lactis IL1403 | 3.00E−06 |
| | | | section 168 of 218 of the complete | |
| | | | genome | |
| 691 | 3580.M17.GZ43_510205 | AF348584 | Arabidopsis thaliana unknown protein | 6.70E−07 |
| | | | (T8K14.7) mRNA, complete cds | |
| 692 | 3580.M18.GZ43_510221 | X69908 | H. sapiens gene for mitochondrial ATP | 1.00E−05 |
| | | | synthase c subunit (P2 form) | |
| 693 | 3580.M23.GZ43_510301 | M17326 | Mouse endogenous murine leukemia | 9.00E−06 |
| | | | virus polytropic provirus DNA, complete | |
| | | | cds | |
| 694 | 3580.N10.GZ43_510094 | AF103970 | Lasioglossum rohweri cytochrome | 1.00E−06 |
| | | | oxidase I (COI) gene, mitochondrial | |
| | | | gene encoding mitochondrial protein, | |
| | | | partial cds | |
| 695 | 3580.N11.GZ43_510110 | Z80362 | H. sapiens HLA-DRB pseudogene, exon | 6.10E−11 |
| | | | 1; | |
| 696 | 3580.N14.GZ43_510158 | AB014462 | Xenopus laevis XNLRR-1 mRNA, | 1.60E−05 |
| | | | complete cds | |
| 697 | 3580.N15.GZ43_510174 | AF164381 | Anomochloa marantoidea maturase | 1.00E−06 |
| | | | (matK) gene, complete cds; chloroplast | |
| | | | gene for chloroplast product | |
| 698 | 3580.N23.GZ43_510302 | AB047880 | Macaca fascicularis brain cDNA, | 2.00E−06 |
| | | | clone: QnpA-14303 | |
| 699 | 3580.O02.GZ43_509967 | X55948 | H. aspersa cytoplasmic intermediate | 4.00E−06 |
| | | | filament gene exons 2 to 6 | |
| 700 | 3580.O06.GZ43_510031 | L34649 | Homo sapiens platelet/endothelial cell | 4.00E−06 |
| | | | adhesion molecule-1 (PECAM-1) gene, | |
| | | | exon 14 | |
| 701 | 3580.O07.GZ43_510047 | Z30183 | H. sapiens mig-5 gene | 3.00E−05 |
| 702 | 3580.O08.GZ43_510063 | AF101385 | Homo sapiens ribosomal protein L11 | 1.80E−08 |
| | | | gene, complete cds | |
| 703 | 3580.P04.GZ43_510000 | AC016707 | Homo sapiens BAC clone RP11-221K4 | 1.80E−08 |
| | | | from Y, complete sequence | |
| 704 | 3580.P05.GZ43_510016 | AF055482 | Thermotoga neapolitana galactose | 8.00E−07 |
| | | | utilization operon, complete sequence | |
| 705 | 3580.P14.GZ43_510160 | AF009133 | Rattus norvegicus CD94 (Cd94) mRNA, | 7.50E−08 |
| | | | complete cds | |
| 706 | 3580.P19.GZ43_510240 | Y15176 | Human papillomavirus type 80 E6, E7, | 7.00E−06 |
| | | | E1, E2, E4, L2, and L1 genes | |
| 707 | 3583.B06.GZ43_510402 | X51398 | Chlamydomonas moewusii chloroplast | 3.00E−06 |
| | | | DNA for ORF 563 and transfer RNA- | |
| | | | Thr | |
| 708 | 3583.B07.GZ43_510418 | U39382 | Hexachaeta amabilis 16S ribosomal | 5.50E−08 |
| | | | RNA gene, mitochondrial gene encoding | |
| | | | mitochondrial RNA, partial sequence | |
| 709 | 3583.B10.GZ43_510466 | S45332 | erythropoietin receptor [human, | 3.90E−10 |
| | | | placental, Genomic, 8647 nt] | |
| 710 | 3583.B11.GZ43_510482 | AC006623 | Caenorhabditis elegans clone C52E2, | 4.00E−06 |
| | | | complete sequence | |
| 711 | 3583.D15.GZ43_510548 | AF242297 | Homo sapiens phosducin-like protein | 3.80E−08 |
| | | | gene, promoter and exon 1 | |
| 712 | 3583.D22.GZ43_510660 | Z23548 | H. sapiens (D10S540) DNA segment | 3.20E−07 |
| | | | containing (CA) repeat; clone | |
| | | | AFM205xe11; single read | |
| 713 | 3583.E11.GZ43_510485 | X69737 | E. esula chloroplast rbcL gene for | 1.30E−08 |
| | | | ribulose-1,5-biphosphate-carboxylase | |
| | | | and promoter region | |
| 714 | 3583.E13.GZ43_510517 | AB007856 | Homo sapiens KIAA0396 mRNA, | 2.20E−05 |
| | | | partial cds | |
| 715 | 3583.E15.GZ43_510549 | X74131 | H. nelsoni small subunit ribosomal RNA | 7.00E−06 |
| 716 | 3583.E17.GZ43_510581 | AE006633 | Streptococcus pyogenes M1 GAS strain | 2.40E−07 |
| | | | SF370, section 162 of 167 of the | |
| | | | complete genome | |
| 717 | 3583.F24.GZ43_510694 | J02846 | Human tissue factor gene, complete cds | 7.40E−07 |
| 718 | 3583.G09.GZ43_510455 | X88789 | P. sativum mRNA for starch synthase | 2.10E−05 |
| | | | (2035 bp) | |
| 719 | 3583.G16.GZ43_510567 | AK000735 | Homo sapiens cDNA FLJ20728 fis, | 4.70E−07 |
| | | | clone HEP11763 | |
| 720 | 3583.G17.GZ43_510583 | AK026822 | Homo sapiens cDNA: FLJ23169 fis, | 2.60E−05 |
| | | | clone LNG09957 | |
| 721 | 3583.G21.GZ43_510647 | U13044 | Human nuclear respiratory factor-2 | 2.00E−06 |
| | | | subunit alpha mRNA, complete cds | |
| 722 | 3583.H03.GZ43_510360 | M26222 | African green monkey origin of | 1.00E−13 |
| | | | replication (ORS9) region | |
| 723 | 3583.H12.GZ43_510504 | X01669 | Human c-k-ras oncogene exon 2 from | 3.20E−08 |
| | | | lung carcinoma pr310 | |
| 724 | 3583.H13.GZ43_510520 | AK022380 | Homo sapiens cDNA FLJ12318 fis, | 2.00E−06 |
| | | | clone MAMMA1002068 | |
| 725 | 3583.H15.GZ43_510552 | L77119 | Methanococcus jannaschii small extra- | 1.60E−05 |
| | | | chromosomal element, complete | |
| | | | sequence.˜ | |
| 726 | 3583.J02.GZ43_510346 | AJ007302 | Sus scrofa triadin gene | 1.00E−06 |
| 727 | 3583.K08.GZ43_510443 | D63902 | Mouse mRNA for estrogen-responsive | 2.50E−11 |
| | | | finger protein, complete cds | |
| 728 | 3583.K10.GZ43_510475 | U11816 | Lactobacillus strain 30A ornithine | 1.00E−05 |
| | | | decarboxylase (odci) gene, complete cds | |
| 729 | 3583.K11.GZ43_510491 | X73416 | W. suaveolens mitochondrial orf1 | 6.00E−06 |
| 730 | 3583.K14.GZ43_510539 | U04367 | Bacillus thuringiensis dakota HD511 | 1.20E−05 |
| | | | CryIII delta-endotoxin gene, partial cds | |
| 731 | 3583.K17.GZ43_510587 | AE004129 | Vibrio cholerae chromosome I, section | 8.00E−06 |
| | | | 37 of 251 of the complete chromosome | |
| 732 | 3583.K23.GZ43_510683 | AE001410 | Plasmodium falciparum chromosome 2, | 4.00E−06 |
| | | | section 47 of 73 of the complete | |
| | | | sequence | |
| 733 | 3583.L05.GZ43_510396 | X55299 | C. stercorarium celZ gene for endo-beta- | 1.00E−05 |
| | | | 1,4-glucanase (Avicelase I) | |
| 734 | 3583.L08.GZ43_510444 | AF106953 | Homo sapiens SOS1 (SOS1) gene, | 7.50E−09 |
| | | | partial cds | |
| 735 | 3583.L09.GZ43_510460 | L34842 | Soybean chloroplast phytochrome A | 2.40E−05 |
| | | | (phyA) gene, complete cds | |
| 736 | 3583.L17.GZ43_510588 | X65223 | T. rubrum mitochondrion genes for | 5.00E−06 |
| | | | cytochrome oxidase I, cytochrome | |
| | | | oxidase II, ATPase 9, NADH | |
| | | | dehydrogenase subunit 4L, NADH | |
| | | | dehydrogenase subunit 5, tRNA-Gln, | |
| | | | tRNA-Met and tRNA-Arg | |
| 737 | 3583.L21.GZ43_510652 | AF106661 | Rattus norvegicus glutathione S- | 5.00E−06 |
| | | | transferase Yb4 (GstYb4) gene, | |
| | | | complete cds | |
| 738 | 3583.M08.GZ43_510445 | BC005276 | Homo sapiens, Similar to GRO2 | 3.70E−07 |
| | | | oncogene, clone IMAGE: 4071652, | |
| | | | mRNA | |
| 739 | 3583.M10.GZ43_510477 | Y00477 | Human bone marrow serine protease | 4.70E−09 |
| | | | gene (medullasin) (leukocyte neutrophil | |
| | | | elastase gene) | |
| 740 | 3583.M13.GZ43_510525 | X73030 | S. cerevisiae YGP1 gene | 7.00E−06 |
| 741 | 3583.N09.GZ43_510462 | AK018377 | Mus musculus 16 days embryo lung | 4.60E−07 |
| | | | cDNA, RIKEN full-length enriched | |
| | | | library, clone: 8430403M08, full insert | |
| | | | sequence | |
| 742 | 3583.O03.GZ43_510367 | X72698 | P. pygmaeus ZFY gene for Y-linked Zinc | 3.00E−06 |
| | | | finger protein, final intron | |
| 743 | 3583.O11.GZ43_510495 | U40161 | Arabidopsis thaliana type 2A protein | 2.00E−06 |
| | | | serine/threonine phosphatase 55 kDa B | |
| | | | regulatory subunit mRNA, complete cds | |
| 744 | 3583.O17.GZ43_510591 | U67567 | Methanococcus jannaschii section 109 of | 2.00E−06 |
| | | | 150 of the complete genome | |
| 745 | 3583.P09.GZ43_510464 | AK021312 | Mus musculus 13 days embryo stomach | 3.60E−08 |
| | | | cDNA, RIKEN full-length enriched | |
| | | | library, clone: D530039A21, full insert | |
| | | | sequence | |
| 746 | 3583.P19.GZ43_510624 | U12920 | Caenorhabditis elegans sex | 1.60E−05 |
| | | | determination (tra-3) gene, exons 2-6 | |
| 747 | 3583.P22.GZ43_510672 | AJ133800 | Homo sapiens CPNE7 gene (partial), | 7.60E−07 |
| | | | exon 2 | |
| 748 | 3590.A12.GZ43_512274 | AF185661 | Glomus intraradices strain FL208 18S | 2.00E−06 |
| | | | ribosomal RNA, partial sequence; | |
| | | | internal transcribed spacer 1, 5.8S | |
| | | | ribosomal RNA and internal transcribed | |
| | | | spacer 2, complete sequence; 26S | |
| | | | ribosomal RNA, partial sequence | |
| 749 | 3590.B01.GZ43_512099 | M96068 | Madagascar periwinkle | 7.40E−09 |
| | | | hydroxymethylglutaryl-CoA reductase | |
| | | | (HMGR) mRNA, complete cds | |
| 750 | 3590.B16.GZ43_512339 | V01527 | Mouse gene coding for major | 2.40E−12 |
| | | | histocompatibility antigen. This is a class | |
| | | | II antigen, I-A-beta | |
| 751 | 3590.B21.GZ43_512419 | AB028983 | Homo sapiens mRNA for KIAA1060 | 1.70E−05 |
| | | | protein, partial cds | |
| 752 | 3590.C20.GZ43_512404 | D86566 | Human DNA for NOTCH4, partial cds | 3.20E−07 |
| 753 | 3590.D03.GZ43_512133 | D10371 | phocine distemper virus (PDV) genomic | 2.90E−05 |
| | | | RNA for N, P, V, C, M, F, H and L | |
| | | | protein | |
| 754 | 3590.D19.GZ43_512389 | M96163 | Mus musculus (clone 2) serum inducible | 7.80E−10 |
| | | | kinase (SNK) mRNA, mRNA sequence | |
| 755 | 3590.D23.GZ43_512453 | AF086485 | Homo sapiens full length insert cDNA | 7.70E−09 |
| | | | clone ZD93E02 | |
| 756 | 3590.E08.GZ43_512214 | AF055278 | Homo sapiens DNA repair protein | 5.90E−12 |
| | | | XRCC4 (XRCC4) gene, exon 1 | |
| 757 | 3590.E10.GZ43_512246 | AE001477 | Helicobacter pylori, strain J99 section 38 | 2.00E−06 |
| | | | of 132 of the complete genome | |
| 758 | 3590.F01.GZ43_512103 | AF080395 | Entamoeba histolytica actin binding | 2.00E−06 |
| | | | protein (abp2) mRNA, partial cds | |
| 759 | 3590.F16.GZ43_512343 | X79388 | B. subtilis (168) prkA gene | 1.20E−05 |
| 760 | 3590.G01.GZ43_512104 | U32690 | Haemophilus influenzae Rd section 5 of | 2.80E−05 |
| | | | 163 of the complete genome | |
| 761 | 3590.G02.GZ43_512120 | U68040 | Cochliobolus heterostrophus polyketide | 1.25E−04 |
| | | | synthase (PKS1) gene, complete cds | |
| 762 | 3590.H04.GZ43_512153 | X66013 | T. aestivum gene for cathepsin B (Al16) | 2.50E−07 |
| 763 | 3590.H06.GZ43_512185 | X66177 | M. musculus mRNA for Hox 2.7 protein | 8.00E−06 |
| 764 | 3590.H09.GZ43_512233 | AF012899 | Sambucus nigra ribosome inactivating | 3.40E−11 |
| | | | protein precursor mRNA, complete cds | |
| 765 | 3590.H12.GZ43_512281 | Y15724 | Homo sapiens SERCA3 gene, exons 1-7 | 2.00E−06 |
| | | | (and joined CDS) | |
| 766 | 3590.H16.GZ43_512345 | AF064079 | Plasmodium gallinaceum endochitinase | 6.70E−09 |
| | | | precursor, mRNA, complete cds | |
| 767 | 3590.I16.GZ43_512346 | L06280 | Drosophila melanogaster adenine | 4.40E−07 |
| | | | phosphoribosyltransferase (APRT) gene, | |
| | | | complete cds | |
| 768 | 3590.J01.GZ43_512107 | X69573 | T. reesei xyn1 gene, complete CDS | 1.70E−07 |
| 769 | 3590.J02.GZ43_512123 | AF092047 | Homo sapiens homeobox protein Six3 | 4.00E−06 |
| | | | (SIX3) gene, complete cds | |
| 770 | 3590.J18.GZ43_512379 | AB027966 | Schizosaccharomyces pombe gene for | 2.60E−08 |
| | | | Hypothetical protein, partial cds, | |
| | | | clone: TB89 | |
| 771 | 3590.J21.GZ43_512427 | AK014727 | Mus musculus 0 day neonate head | 7.90E−08 |
| | | | cDNA, RIKEN full-length enriched | |
| | | | library, clone: 4833419G08, full insert | |
| | | | sequence | |
| 772 | 3590.J22.GZ43_512443 | AK020136 | Mus musculus 12 days embryo male | 5.90E−08 |
| | | | wolffian duct includes surrounding | |
| | | | region cDNA, RIKEN full-length | |
| | | | enriched library, clone: 6720460K10, full | |
| | | | insert sequence | |
| 773 | 3590.K06.GZ43_512188 | AF171890 | Trimeresurus trigonocephalus | 3.00E−06 |
| | | | cytochrome b (cytb) gene, partial cds; | |
| | | | mitochondrial gene for mitochondrial | |
| | | | product | |
| 774 | 3590.K10.GZ43_512252 | U16775 | Human immunodeficiency virus type 1 | 6.00E−06 |
| | | | isolate VE6 reverse transcriptase (pol) | |
| | | | gene, partial cds | |
| 775 | 3590.K19.GZ43_512396 | U40454 | Candida albicans topoisomerase type I | 3.00E−06 |
| | | | (CATOP1) gene, complete cds | |
| 776 | 3590.L08.GZ43_512221 | U52198 | Vibrio anguillarum flagellin E (flaE), | 2.00E−05 |
| | | | flagellin D (flaD), and flagellin B (flaB) | |
| | | | genes, complete cds, and (flaG) gene, | |
| | | | partial cds | |
| 777 | 3590.L10.GZ43_512253 | U01155 | Xenopus laevis angiotensin II receptor | 4.00E−06 |
| | | | mRNA, complete cds | |
| 778 | 3590.M03.GZ43_512142 | AF252499 | Bos taurus clone MNB-88 microsatellite | 4.60E−08 |
| | | | sequence | |
| 779 | 3590.M04.GZ43_512158 | AE007607 | Clostridium acetobutylicum ATCC824 | 4.50E−05 |
| | | | section 95 of 356 of the complete | |
| | | | genome | |
| 780 | 3590.M09.GZ43_512238 | L04758 | Oryctolagus cuniculus cytochrome P-450 | 1.00E−06 |
| | | | (CYP4A4) gene, 5′ end | |
| 781 | 3590.N04.GZ43_512159 | Z82038 | C. thermosaccharolyticum etfB, etfA, | 2.00E−06 |
| | | | hbd, thlA and actA genes | |
| 782 | 3590.N19.GZ43_512399 | U15603 | Saccharomyces cerevisiae Csd3p | 4.00E−06 |
| | | | (CSD3) gene, complete cds | |
| 783 | 3590.N21.GZ43_512431 | L19535 | Drosophila subobscura sry alpha gene, | 6.00E−06 |
| | | | complete cds | |
| 784 | 3590.O08.GZ43_512224 | L36588 | Homo sapiens intron-encoded U22 small | 4.30E−07 |
| | | | nucleolar RNA (UHG) gene | |
| 785 | 3596.C02.GZ43_512500 | L14849 | Drosophila melanogaster cytoplasmic | 8.90E−09 |
| | | | protein tyrosine phosphatase (PTP61F) | |
| | | | mRNA, complete cds | |
| 786 | 3596.C20.GZ43_512788 | M60286 | Herpesvirus saimiri immediate early | 1.30E−07 |
| | | | region protein genes, complete cds | |
| 787 | 3596.C22.GZ43_512820 | X15121 | Soybean Gy1 gene for glycinin subunit | 1.00E−06 |
| | | | G1 | |
| 788 | 3596.D01.GZ43_512485 | Z78414 | Caenorhabditis elegans cosmid W09D12, | 4.00E−06 |
| | | | complete sequence | |
| 789 | 3596.D07.GZ43_512581 | M88242 | Mouse glucocortoid-regulated | 1.70E−05 |
| | | | inflammatory prostaglandin G/H | |
| | | | synthase (griPGHS) mRNA, complete | |
| | | | cds | |
| 790 | 3596.D09.GZ43_512613 | X99710 | L. lactis ORF, genes homologous to vsf-1 | 5.00E−06 |
| | | | and pepF2 and gene encoding protein | |
| | | | homologous to methyltransferase | |
| 791 | 3596.D17.GZ43_512741 | AF200361 | Rattus norvegicus cytochrome P450 4F1 | 1.40E−05 |
| | | | (Cyp4F1) gene, complete cds | |
| 792 | 3596.E08.GZ43_512598 | AF111848 | Homo sapiens PRO0529 mRNA, | 5.00E−06 |
| | | | complete cds | |
| 793 | 3596.E22.GZ43_512822 | X58178 | S. pyogenes for emm41 gene | 5.00E−06 |
| 794 | 3596.F10.GZ43_512631 | AL390161 | Homo sapiens mRNA; cDNA | 2.00E−06 |
| | | | DKFZp761P0615 (from clone | |
| | | | DKFZp761P0615) | |
| 795 | 3596.G13.GZ43_512680 | AJ000044 | Tenebrio molitor LPCP29 gene | 2.00E−06 |
| 796 | 3596.H04.GZ43_512537 | U65018 | Dictyostelium discoideum | 3.60E−07 |
| | | | mannosyltransferase gene, complete cds | |
| 797 | 3596.H10.GZ43_512633 | AF104390 | Penaeus monodon hyperglycemic | 2.00E−06 |
| | | | hormone homolog PmSGP-V precursor, | |
| | | | mRNA, complete cds | |
| 798 | 3596.H17.GZ43_512745 | D28915 | Human gene for hepatitis C-associated | 1.00E−06 |
| | | | microtubular aggregate protein p44, exon | |
| | | | 9 and complete cds | |
| 799 | 3596.H22.GZ43_512825 | AF198250 | Dictyostelium discoideum lim2 protein | 7.30E−07 |
| | | | (limB) mRNA, complete cds | |
| 800 | 3596.I06.GZ43_512570 | U32444 | Solanum lycopersicum phytochrome F | 1.10E−05 |
| | | | (PHYF) gene, partial cds | |
| 801 | 3596.I16.GZ43_512730 | U32444 | Solanum lycopersicum phytochrome F | 8.00E−06 |
| | | | (PHYF) gene, partial cds | |
| 802 | 3596.J04.GZ43_512539 | D28596 | Chicken gene for c-maf proto-oncogene | 9.30E−10 |
| | | | product c-Maf, short form complete cds | |
| | | | and long form 1st exon | |
| 803 | 3596.J13.GZ43_512683 | AB007856 | Homo sapiens KIAA0396 mRNA, | 2.40E−05 |
| | | | partial cds | |
| 804 | 3596.K14.GZ43_512700 | AC024752 | Caenorhabditis elegans cosmid Y1B5A, | 3.00E−06 |
| | | | complete sequence | |
| 805 | 3596.K15.GZ43_512716 | Y00469 | Yeast mRNA for profilin | 2.00E−06 |
| 806 | 3596.L01.GZ43_512493 | X79703 | O. aries gene for beta-casein | 4.00E−06 |
| 807 | 3596.L08.GZ43_512605 | AJ007313 | Streptomyces coelicolor sigT, trxB and | 9.80E−07 |
| | | | trxA genes, and ORF1 and ORF2 | |
| 808 | 3596.L13.GZ43_512685 | AK018239 | Mus musculus adult male medulla | 1.00E−06 |
| | | | oblongata cDNA, RIKEN full-length | |
| | | | enriched library, clone: 6330563C09, full | |
| | | | insert sequence | |
| 809 | 3596.N02.GZ43_512511 | AE001387 | Plasmodium falciparum chromosome 2, | 1.00E−06 |
| | | | section 24 of 73 of the complete | |
| | | | sequence | |
| 810 | 3596.N12.GZ43_512671 | Z12841 | O. cuniculus mRNA for phospholipase | 4.00E−06 |
| 811 | 3596.N15.GZ43_512719 | U14186 | Bos taurus general vesicular transport | 1.70E−05 |
| | | | factor p115 mRNA, complete cds | |
| 812 | 3596.N16.GZ43_512735 | U41106 | Caenorhabditis elegans cosmid W06A11 | 1.10E−05 |
| 813 | 3596.N21.GZ43_512815 | AF097717 | Homo sapiens 3′-phosphoadenosine 5′- | 1.40E−07 |
| | | | phosphosulfate synthetase (PAPSS), | |
| | | | exon 8 | |
| 814 | 3596.O10.GZ43_512640 | AE001649 | Chlamydia pneumoniae section 65 of | 1.10E−05 |
| | | | 103 of the complete genome | |
| 815 | 3596.O12.GZ43_512672 | AC006623 | Caenorhabditis elegans clone C52E2, | 4.00E−06 |
| | | | complete sequence | |
| 816 | 3596.P03.GZ43_512529 | X82317 | C. thummi CpY gene | 1.49E−03 |
| 817 | 3596.P04.GZ43_512545 | AF111855 | Agrobacterium tumefaciens RNA | 2.00E−06 |
| | | | polymerase alpha subunit (rpoA) gene, | |
| | | | complete cds | |
| 818 | 3596.P07.GZ43_512593 | L40817 | Homo sapiens muscle-specific DNase I- | 3.00E−06 |
| | | | like (DNL1L) gene, exons 1-9, complete | |
| | | | cds | |
| 819 | 3596.P08.GZ43_512609 | M14505 | Human (clone PSK-J3) cyclin-dependent | 5.00E−06 |
| | | | protein kinase mRNA, complete cds., | |
| 820 | 3596.P10.GZ43_512641 | M73770 | P. falciparum RNA polymerase III largest | 2.90E−05 |
| | | | subunit gene, complete cds | |
| 821 | 3596.P21.GZ43_512817 | S82725 | NPM/ALK = fusion gene {translocation | 1.00E−07 |
| | | | breakpoint} [human, lymphoma cells | |
| | | | SU-DHL-1, Genomic, 1679 nt] | |
| 822 | 3599.A04.GZ43_512914 | X83212 | H. sapiens tryptophan hydroxylase gene, | 5.50E−07 |
| | | | promoter region | |
| 823 | 3599.A23.GZ43_513218 | U05259 | Human MB-1 gene, complete cds | 2.10E−05 |
| 824 | 3599.B15.GZ43_513091 | AF277068 | HIV-1 clone QH0791 from Trinidad and | 6.10E−07 |
| | | | Tobago, envelope protein (env) gene, | |
| | | | complete cds | |
| 825 | 3599.B16.GZ43_513107 | M60517 | Chicken vitronectin receptor alpha | 4.00E−06 |
| | | | subunit mRNA, complete cds | |
| 826 | 3599.C03.GZ43_512900 | AB021267 | Arabidopsis thaliana copia-like | 2.00E−06 |
| | | | retrotransposon AtRE2-2 gene for | |
| | | | polyprotein, complete cds | |
| 827 | 3599.C17.GZ43_513124 | U28055 | Homo sapiens hepatocyte growth factor- | 3.00E−06 |
| | | | like protein homolog mRNA, partial cds | |
| 828 | 3599.D03.GZ43_512901 | L43550 | Buchnera aphidicola anthranilate | 3.00E−06 |
| | | | synthase small subunit (trpG) gene, | |
| | | | anthranilate synthase large subunit (trpE) | |
| | | | gene, complete cds | |
| 829 | 3599.D05.GZ43_512933 | AL023779 | S. pombe chromosome II cosmid c244 | 2.00E−06 |
| 830 | 3599.D07.GZ43_512965 | AL391223 | Human chromosome 14 DNA sequence | 5.00E−06 |
| | | | Partial sequence from BAC R- | |
| | | | 325N7_PCR1 of library RPCI-11 from | |
| | | | chromosome 14 of Homo sapiens | |
| | | | (Human), complete sequence | |
| 831 | 3599.D10.GZ43_513013 | AF064079 | Plasmodium gallinaceum endochitinase | 1.70E−07 |
| | | | precursor, mRNA, complete cds | |
| 832 | 3599.E01.GZ43_512870 | U09184 | Buchnera aphidicola ferredoxin-NADP | 9.60E−07 |
| | | | reductase (fprl) gene, partial cds; | |
| | | | anthranilate synthase large subunit (trpE) | |
| | | | and anthranilate synthase small subunit | |
| | | | (trpG) genes, complete cds; heat shock | |
| | | | protein (hslU) gene, partial cds; and | |
| | | | unknown gene | |
| 833 | 3599.E05.GZ43_512934 | X60145 | Human J-alpha segment J-alpha FR9 | 1.20E−05 |
| | | | mRNA for J-alpha region of T-cell | |
| | | | receptor | |
| 834 | 3599.F17.GZ43_513127 | U27037 | Fistulina hepatica mitochondrial small | 2.00E−06 |
| | | | subunit ribosomal RNA, mitochondrial | |
| | | | gene, partial sequence | |
| 835 | 3599.F24.GZ43_513239 | Z78414 | Caenorhabditis elegans cosmid W09D12, | 5.00E−06 |
| | | | complete sequence | |
| 836 | 3599.H05.GZ43_512937 | AF032891 | Camponotus consobrinus microsatellite- | 2.10E−08 |
| | | | containing sequence Ccon12 | |
| 837 | 3599.H23.GZ43_513225 | AB024553 | Bacillus halodurans DNA, complete and | 4.70E−07 |
| | | | partial cds, strain: C-125 | |
| 838 | 3599.J11.GZ43_513035 | AB025112 | Xenopus laevis XGC-2 mRNA for | 3.00E−06 |
| | | | guanylyl cyclase-2, complete cds | |
| 839 | 3599.K02.GZ43_512892 | AJ224474 | Borrelia burgdorferi left chromosomal | 3.00E−06 |
| | | | subtelomeric region (truA gene) | |
| 840 | 3599.K04.GZ43_512924 | X99710 | L. lactis ORF, genes homologous to vsf-1 | 5.00E−06 |
| | | | and pepF2 and gene encoding protein | |
| | | | homologous to methyltransferase | |
| 841 | 3599.K23.GZ43_513228 | AF074247 | Homo sapiens neuronal delayed-rectifier | 8.00E−07 |
| | | | voltage-gated potassium channel splice | |
| | | | variant (KCNQ2) mRNA, complete cds | |
| 842 | 3599.L04.GZ43_512925 | X59773 | Pisum sativum mRNA for P protein, a | 1.40E−05 |
| | | | part of glycine cleavage complex | |
| 843 | 3599.L15.GZ43_513101 | U34282 | Rattus norvegicus fast skeletal muscle | 2.00E−06 |
| | | | sarcoplasmic reticulum Ca-ATPase | |
| | | | (SERCA1) gene, 5′-flanking sequence | |
| 844 | 3599.M04.GZ43_512926 | AK018953 | Mus musculus adult male testis cDNA, | 2.30E−11 |
| | | | RIKEN full-length enriched library, | |
| | | | clone: 1700111D04, full insert sequence | |
| 845 | 3599.M22.GZ43_513214 | AB052179 | Macaca fascicularis brain cDNA, | 4.70E−07 |
| | | | clone: QnpA-21934 | |
| 846 | 3599.M24.GZ43_513246 | AE003394 | Drosophila melanogaster genomic | 7.30E−07 |
| | | | scaffold 142000013386028, complete | |
| | | | sequence | |
| 847 | 3599.N09.GZ43_513007 | X16362 | Rat SPI-2 serine protease inhibitor gene | 1.19E−04 |
| 848 | 3599.N16.GZ43_513119 | X92421 | X. laevis mRNA for RNA helicase p54 | 3.00E−06 |
| 849 | 3599.N20.GZ43_513183 | M59447 | Drosophila melanogaster Sex-lethal | 2.00E−06 |
| | | | (Sx1) mRNA, complete cds | |
| 850 | 3599.N24.GZ43_513247 | AC005485 | Homo sapiens PAC clone RP5-998M2 | 2.00E−07 |
| | | | from 7q33-q35, complete sequence | |
| 851 | 3599.O06.GZ43_512960 | AJ131667 | Escherichia coli plasmid pSFO157 | 2.00E−06 |
| 852 | 3599.O17.GZ43_513136 | X96607 | M. musculus IgH 3′ alpha enhancer DNA | 8.10E−05 |
| 853 | 3599.P05.GZ43_512945 | X77111 | N. tabacum chi-V gene | 1.50E−07 |
| 854 | 3602.A09.GZ43_513378 | AF015303 | Xenopus laevis small GTPase Ran | 1.10E−05 |
| | | | binding protein 1 mRNA, complete cds | |
| 855 | 3602.B18.GZ43_513523 | L18892 | Tetrahymena thermophila histone | 5.70E−07 |
| | | | (H2A.1) gene, complete cds | |
| 856 | 3602.B21.GZ43_513571 | BC005233 | Homo sapiens, clone MGC: 12257 | 1.60E−10 |
| | | | IMAGE: 3950129, mRNA, complete cds | |
| 857 | 3602.B22.GZ43_513587 | X71765 | P. falciparum gene for Ca2+ —ATPase | 1.00E−06 |
| 858 | 3602.C24.GZ43_513620 | AL080106 | Homo sapiens mRNA; cDNA | 2.00E−06 |
| | | | DKFZp566O053 (from clone | |
| | | | DKFZp566O053) | |
| 859 | 3602.D06.GZ43_513333 | AF098970 | Phaseolus vulgaris NBS-LRR-like | 1.70E−07 |
| | | | protein cD7 (CO-2) mRNA, partial cds | |
| 860 | 3602.D11.GZ43_513413 | M59770 | P. falciparum calmodulin gene, complete | 2.20E−07 |
| | | | cds | |
| 861 | 3602.E04.GZ43_513302 | X53582 | Zea mays ZMPMS1 gene for 19 kDa | 1.30E−05 |
| | | | zein protein | |
| 862 | 3602.E06.GZ43_513334 | L38718 | Providencia stuartii (clone pSK.aarP) | 7.90E−07 |
| | | | transcriptional activator (aarP) gene, | |
| | | | complete cds | |
| 863 | 3602.E13.GZ43_513446 | U58106 | Blomia tropicalis allergen mRNA, | 1.70E−07 |
| | | | complete cds | |
| 864 | 3602.E21.GZ43_513574 | M15085 | T. brucei expressed copy of the ILTat 1.3 | 2.90E−07 |
| | | | variable surface glycoprotein gene, 5′ | |
| | | | flank | |
| 865 | 3602.F12.GZ43_513431 | X64802 | H. sapiens F8 mRNA for Interleukin-1- | 3.40E−58 |
| | | | like species | |
| 866 | 3602.G03.GZ43_513288 | AF036148 | Danio rerio NeuroD (nrd) mRNA, | 2.00E−06 |
| | | | complete cds | |
| 867 | 3602.G17.GZ43_513512 | U41106 | Caenorhabditis elegans cosmid W06A11 | 1.30E−05 |
| 868 | 3602.I07.GZ43_513354 | AF000941 | Mus musculus DNAse I hypersensitive | 1.20E−05 |
| | | | sites 2-6 of locus control region (LCR) | |
| | | | for T-cell receptor alpha chain (TCRa) | |
| | | | gene | |
| 869 | 3602.I11.GZ43_513418 | AL133620 | Homo sapiens mRNA; cDNA | 3.00E−06 |
| | | | DKFZp434F0621 (from clone | |
| | | | DKFZp434F0621) | |
| 870 | 3602.I15.GZ43_513482 | U23479 | Dictyostelium discoideum | 8.00E−07 |
| | | | phosphatidylinositol 4-kinase (PIK4) | |
| | | | mRNA, complete cds | |
| 871 | 3602.J13.GZ43_513451 | AK025319 | Homo sapiens cDNA: FLJ21666 fis, | 3.30E−07 |
| | | | clone COL08915 | |
| 872 | 3602.K03.GZ43_513292 | X85811 | S. cerevisiae tRNA-Leu, and ORF's | 1.10E−05 |
| | | | N2212, N2215, N2219, N2223, N2227, | |
| | | | N2231 | |
| 873 | 3602.K06.GZ43_513340 | AF133052 | Walleye epidermal hyperplasia virus | 4.00E−06 |
| | | | type 2 long terminal repeat, complete | |
| | | | sequence; gag polyprotein (gag-pol) | |
| | | | gene, complete cds; pol polyprotein | |
| | | | (gag-pol) gene, partial cds; envelope | |
| | | | polyprotein (env) and cyclin D homolog | |
| | | | genes, complete cds; and unkn> | |
| 874 | 3602.L20.GZ43_513565 | M62717 | Human CSP-B gene flanking sequence | 1.10E−05 |
| 875 | 3602.N03.GZ43_513295 | Z81126 | Caenorhabditis elegans cosmid T22E6, | 5.70E−05 |
| | | | complete sequence | |
| 876 | 3602.N06.GZ43_513343 | U62503 | Human OBR gene, intron sequence | 1.00E−06 |
| | | | immediately adjacent to the 5′ end of | |
| | | | coding exon 17 | |
| 877 | 3605.A15.gz43_513858 | Z46507 | Bovine herpesvirus type 4 genomic DNA | 5.00E−06 |
| | | | region (V.TEST) | |
| 878 | 3605.C16.gz43_513876 | AF282517 | Homo sapiens clone 10ptel_c6t7 | 9.40E−08 |
| | | | sequence | |
| 879 | 3605.E19.gz43_513926 | Z22923 | M. musculus alpha2 (IX) collagen gene, | 2.10E−05 |
| | | | complete CDS | |
| 880 | 3605.G13.gz43_513832 | AJ132752 | Gadus morhua mRNA for beta2- | 1.30E−05 |
| | | | microglobulin, clone b3 | |
| 881 | 3605.H10.gz43_513785 | AF257480 | Rana temporaria microsatellite SB80 | 4.10E−09 |
| | | | sequence | |
| 882 | 3605.H21.gz43_513961 | X63507 | M. musculus HOX-3.5 gene | 7.80E−05 |
| 883 | 3605.I19.gz43_513930 | AK002100 | Homo sapiens cDNA FLJ11238 fis, | 3.30E−11 |
| | | | clone PLACE1008532 | |
| 884 | 3605.J16.gz43_513883 | AF039197 | Gallus gallus Pax-9 gene, putative 5′ | 1.00E−07 |
| | | | regulatory sequence | |
| 885 | 3605.K19.gz43_513932 | X63853 | S. cerevisiae MAT locus genes BUD5, | 8.00E−06 |
| | | | mat-alpha1, mat-alpha2, YCR724 and | |
| | | | YCR725 | |
| 886 | 3605.M17.gz43_513902 | M30931 | Simian immunodeficiency virus (SIV) | 3.70E−05 |
| | | | proviral, complete genome | |
| 887 | 3605.N04.gz43_513695 | AF169388 | Mus musculus alpha 4 collagen IV | 8.90E−05 |
| | | | (Col4a4) mRNA, complete cds | |
| 888 | 3605.N09.gz43_513775 | AF029111 | Adelius sp. 16S ribosomal RNA gene, | 2.80E−07 |
| | | | mitochondrial gene for mitochondrial | |
| | | | RNA, partial sequence | |
| 889 | 3605.N12.gz43_513823 | BC000358 | Homo sapiens, protein kinase, AMP- | 3.90E−47 |
| | | | activated, gamma 1 non-catalytic | |
| | | | subunit, clone MGC: 8666 | |
| | | | IMAGE: 2964434, mRNA, complete cds | |
| 890 | 3605.N16.gz43_513887 | X95301 | D. rerio mRNA for HER-5 protein | 1.00E−06 |
| 891 | 3608.B06.gz43_514099 | X00004 | .taurus gene encoding pituitary | 6.30E−08 |
| | | | glycoprotein hormone alpha subunit, | |
| | | | exons 3 & 4 | |
| 892 | 3608.B12.gz43_514195 | X00525 | Mouse 28S ribosomal RNA | 3.10E−13 |
| 893 | 3608.B24.gz43_514387 | AF269848 | Staphylococcus epidermidis strain SR1 | 2.00E−06 |
| | | | clone step.1026e06 genomic sequence | |
| 894 | 3608.C18.gz43_514292 | BC000387 | Homo sapiens, U6 snRNA-associated | 2.50E−10 |
| | | | Sm-like protein, clone MGC: 8433 | |
| | | | IMAGE: 2821171, mRNA, complete cds | |
| 895 | 3608.E17.gz43_514278 | BC008245 | Homo sapiens, clone IMAGE: 3875012, | 1.00E−06 |
| | | | mRNA | |
| 896 | 3608.E20.gz43_514326 | U86646 | Ailurus fulgens beta casein gene, exon 7, | 4.70E−07 |
| | | | partial cds | |
| 897 | 3608.F13.gz43_514215 | AF125672 | Homo sapiens silencing mediator of | 2.00E−06 |
| | | | retinoic acid and thyroid hormone | |
| | | | receptor extended isoform (SMRTE) | |
| | | | mRNA, complete cds | |
| 898 | 3608.G09.gz43_514152 | AE001066 | Archaeoglobus fulgidus section 41 of | 4.00E−06 |
| | | | 172 of the complete genome | |
| 899 | 3608.H05.gz43_514089 | AJ224981 | Mus musculus calpain 3 gene, exon 1 | 3.00E−06 |
| 900 | 3608.H14.gz43_514233 | AE007394 | Streptococcus pneumoniae section 77 of | 3.20E−05 |
| | | | 194 of the complete genome | |
| 901 | 3608.H18.gz43_514297 | Z36046 | S. cerevisiae chromosome II reading | 7.00E−06 |
| | | | frame ORF YBR177c | |
| 902 | 3608.J17.gz43_514283 | AF024648 | Arabidopsis thaliana receptor-like | 8.00E−06 |
| | | | serine/threonine kinase (RKF1) mRNA, | |
| | | | complete cds | |
| 903 | 3608.J24.gz43_514395 | AJ002258 | Rattus Norvegicus mRNA for Prx3A | 3.60E−07 |
| | | | protein | |
| 904 | 3608.K03.gz43_514060 | M83199 | Simmondsia chinensis stearoyl-acyl | 2.50E−07 |
| | | | carrier protein desaturase mRNA, | |
| | | | complete cds | |
| 905 | 3608.K14.gz43_514236 | AK026999 | Homo sapiens cDNA: FLJ23346 fis, | 2.00E−06 |
| | | | clone HEP13716 | |
| 906 | 3608.L07.gz43_514125 | M32684 | Homo sapiens ITGB3 gene, intron 13, | 3.60E−07 |
| | | | fragment B, partial sequence | |
| 907 | 3608.L14.gz43_514237 | Z34845 | H. sapiens serotonin transporter gene | 8.60E−07 |
| 908 | 3608.N09.gz43_514159 | AK022341 | Homo sapiens cDNA FLJ12279 fis, | 2.00E−06 |
| | | | clone MAMMA1001743, weakly similar | |
| | | | to Y BOX BINDING PROTEIN-1 | |
| 909 | 3608.N19.gz43_514319 | M15085 | T. brucei expressed copy of the ILTat 1.3 | 7.80E−08 |
| | | | variable surface glycoprotein gene, 5′ | |
| | | | flank | |
| 910 | 3608.N20.gz43_514335 | AF026169 | Homo sapiens SALF (SALF) mRNA, | 1.00E−05 |
| | | | complete cds | |
| 911 | 3608.O04.gz43_514080 | U85193 | Human nuclear factor I-B2 (NFIB2) | 7.10E−07 |
| | | | mRNA, complete cds | |
| 912 | 3608.P22.gz43_514369 | AF124241 | Callerya australis chloroplast tRNA-Leu | 3.90E−07 |
| | | | (trnL) gene, intron sequence | |
| 913 | 3611.A17.gz43_514658 | X01412 | Drosophila melanogaster genes for | 2.00E−06 |
| | | | tRNA-Val and tRNA-Pro (90BC tRNA | |
| | | | locus) | |
| 914 | 3611.B11.gz43_514563 | AL049938 | Homo sapiens mRNA; cDNA | 9.80E−10 |
| | | | DKFZp564P1916 (from clone | |
| | | | DKFZp564P1916); partial cds | |
| 915 | 3611.B16.gz43_514643 | M86514 | Rat proline-rich protein mRNA, 3′ end | 1.30E−05 |
| 916 | 3611.C09.gz43_514532 | U55950 | Pleurodeles waltl cytochrome b (CYT-b) | 2.00E−06 |
| | | | gene, mitochondrial gene encoding | |
| | | | mitochondrial protein, partial cds | |
| 917 | 3611.E07.gz43_514502 | AF261009 | Lethrinus miniatus clone 89rte, | 1.70E−12 |
| | | | microsatellite sequence | |
| 918 | 3611.E12.gz43_514582 | M60200 | Rat vitamin D binding protein gene, | 1.50E−05 |
| | | | exons 5 and 6 | |
| 919 | 3611.E20.gz43_514710 | BC002458 | Homo sapiens, clone IMAGE: 3343171, | 2.00E−06 |
| | | | mRNA, partial cds | |
| 920 | 3611.F15.gz43_514631 | U28328 | Bos taurus dinucleotide repeat RM154, | 4.30E−27 |
| | | | tandem repeat region | |
| 921 | 3611.H10.gz43_514553 | AE003147 | Drosophila melanogaster genomic | 6.00E−07 |
| | | | scaffold 142000013385388, complete | |
| | | | sequence | |
| 922 | 3611.H22.gz43_514745 | X16135 | Human mRNA for novel heterogeneous | 7.00E−06 |
| | | | nuclear RNP protein, L protein | |
| 923 | 3611.I04.gz43_514458 | AK001460 | Homo sapiens cDNA FLJ10598 fis, | 5.10E−44 |
| | | | clone NT2RP2004841 | |
| 924 | 3611.I13.gz43_514602 | M58380 | Arabidopsis thaliana peroxidase (neutral, | 3.00E−06 |
| | | | prxCa) gene, complete cds | |
| 925 | 3611.J04.gz43_514459 | S81486 | p53 {alternatively spliced, intron 9} | 1.20E−07 |
| | | | [human, Genomic Mutant, 133 nt] | |
| 926 | 3611.J15.gz43_514635 | AC008240 | Leishmania major chromosome 22 clone | 4.90E−05 |
| | | | L9259 strain Friedlin, complete sequence | |
| 927 | 3611.J17.gz43_514667 | Z17425 | Lilium speciosum for two putative cds's | 8.90E−07 |
| 928 | 3611.J22.gz43_514747 | U60736 | Human IgHC locus intergenic sequence | 4.60E−07 |
| 929 | 3611.K01.gz43_514412 | AE001377 | Plasmodium falciparum chromosome 2, | 3.00E−06 |
| | | | section 14 of 73 of the complete | |
| | | | sequence | |
| 930 | 3611.K12.gz43_514588 | X02367 | Glaucoma chattoni rDNA 3′ NTS | 9.80E−08 |
| 931 | 3611.L22.gz43_514749 | U19361 | Petromyzon marinus neurofilament | 5.40E−08 |
| | | | subunit NF-180 mRNA, complete cds | |
| 932 | 3611.M18.gz43_514686 | X95301 | D. rerio mRNA for HER-5 protein | 1.00E−06 |
| 933 | 3611.M24.gz43_514782 | AF010239 | Caenorhabditis elegans glutathione S- | 7.70E−07 |
| | | | transferase (CeGST1) mRNA, complete | |
| | | | cds | |
| 934 | 3611.N01.gz43_514415 | L19300 | Staphylococcus aureus DNA sequence | 1.00E−06 |
| | | | encoding three ORFs, complete cds; | |
| | | | prophage phi-11 sequence homology, 5′ | |
| | | | flank | |
| 935 | 3611.N09.gz43_514543 | U50382 | Danio rerio beta and alpha globin genes, | 7.00E−06 |
| | | | partial cds | |
| 936 | 3611.O16.gz43_514656 | AB056785 | Macaca fascicularis brain cDNA | 6.60E−07 |
| | | | clone: QnpA-11655, full insert sequence | |
| 937 | 3611.P08.gz43_514529 | AK026905 | Homo sapiens cDNA: FLJ23252 fis, | 8.00E−06 |
| | | | clone COL04668 | |
| 938 | 3614.C18.gz43_515060 | AF239178 | Paracoccidioides brasiliensis lon | 5.00E−06 |
| | | | proteinase gene, complete cds; nuclear | |
| | | | gene for mitochondrial product | |
| 939 | 3614.D14.gz43_514997 | AB017511 | Hydra magnipapillata mRNA for PLC- | 1.20E−05 |
| | | | betaH1, complete cds | |
| 940 | 3614.D21.gz43_515109 | L10713 | Pig trinucleotide repeat | 1.80E−05 |
| 941 | 3614.E06.gz43_514870 | X99739 | M. musculus mRNA for UBC9 protein, | 9.10E−07 |
| | | | containing ubiquitin box | |
| 942 | 3614.F22.gz43_515127 | AK021490 | Homo sapiens cDNA FLJ11428 fis, | 2.00E−06 |
| | | | clone HEMBA1001071, highly similar | |
| | | | to PROCOLLAGEN ALPHA 1(III) | |
| | | | CHAIN PRECURSOR | |
| 943 | 3614.G20.gz43_515096 | M86514 | Rat prolin-rich protein mRNA, 3′ end | 1.30E−05 |
| 944 | 3614.H09.gz43_514921 | AF068289 | Homo sapiens HDCMD34P mRNA, | 6.60E−11 |
| | | | complete cds | |
| 945 | 3614.H22.gz43_515129 | X62423 | P. falciparum pol delta gene for DNA | 4.00E−06 |
| | | | polymerase delta | |
| 946 | 3614.J07.gz43_514891 | X81027 | H. sapiens tal-1 DNA | 1.30E−05 |
| 947 | 3614.K22.gz43_515132 | X63073 | Pseudanabaena sp. cpeBA operon | 1.60E−05 |
| | | | encoding phycoerythrin beta and alpha | |
| | | | subunits | |
| 948 | 3614.L13.gz43_514989 | V01561 | Mouse dispersed repetitive DNA | 3.00E−06 |
| | | | sequences of the R-family and simple | |
| | | | sequence DNA; member of the B1 | |
| | | | family of mouse dispersed repetitive | |
| | | | DNA sequences | |
| 949 | 3614.M08.gz43_514910 | AF272983 | Homo sapiens SRC tyrosine kinase gene, | 4.00E−06 |
| | | | exons 1alpha and 1a, alternatively | |
| | | | spliced | |
| 950 | 3614.O02.gz43_514816 | X58913 | Mitochondrion Drosophila eugracilis | 8.50E−08 |
| | | | ND2 and COI genes (partial) and genes | |
| | | | for tRNA-Trp, tRNA-Tyr, and tRNA- | |
| | | | Cys | |
| 951 | 3614.O07.gz43_514896 | AL031538 | S. pombe chromosome III cosmid c1906 | 9.80E−07 |
| 952 | 3614.O16.gz43_515040 | AB056785 | Macaca fascicularis brain cDNA | 2.00E−06 |
| | | | clone: QnpA-11655, full insert sequence | |
| 953 | 3614.P11.gz43_514961 | X91656 | M. musculus Srp20 gene | 4.60E−05 |
| 954 | 3614.P16.gz43_515041 | Z58907 | H. sapiens CpG island DNA genomic | 3.20E−70 |
| | | | Mse1 fragment, clone 116a6, forward | |
| | | | read cpg116a6.ft1a | |
| 955 | 3617.B16.gz43_515411 | AF098275 | Homo sapiens PSI2TOM20 pseudogene, | 1.10E−67 |
| | | | complete sequence | |
| 956 | 3617.C21.gz43_515492 | AJ009913 | Bos taurus plp gene | 3.40E−05 |
| 957 | 3617.F10.gz43_515319 | L07487 | Bradyrhizobium japonicum heme-copper | 6.70E−05 |
| | | | oxidase subunit I homolog (fixN), | |
| | | | cytochrome c (fixO), transmembrane | |
| | | | proteins (fixO and fixQ) diheme | |
| | | | cytochrome c (fixP) and fixG genes, | |
| | | | complete cds | |
| 958 | 3617.H16.gz43_515417 | X54192 | O. sativa GluB-2 gene for glutelin | 2.00E−06 |
| 959 | 3617.I01.gz43_515178 | AL513316 | Human DNA sequence from clone | 7.20E−08 |
| | | | RP11-522O3 on chromosome 10, | |
| | | | complete sequence [Homo sapiens] | |
| 960 | 3617.L16.gz43_515421 | AE007662 | Clostridium acetobutylicum ATCC824 | 3.00E−06 |
| | | | section 150 of 356 of the complete | |
| | | | genome | |
| 961 | 3617.L21.gz43_515501 | AL031538 | S. pombe chromosome III cosmid c1906 | 1.00E−06 |
| 962 | 3617.M08.gz43_515294 | X64802 | H. sapiens F8 mRNA for Interleukin-1- | 3.40E−58 |
| | | | like species | |
| 963 | 3617.M13.gz43_515374 | Z79239 | H. sapiens flow-sorted chromosome 6 | 1.10E−07 |
| | | | TaqI fragment, SC6pA26F6 | |
| 964 | 3617.N05.gz43_515247 | AF387666 | Mandrillus cytomegalovirus strain | 1.00E−06 |
| | | | OCOM6-2 glycoprotein B (gB) gene, | |
| | | | partial cds | |
| 965 | 3617.N10.gz43_515327 | AB017511 | Hydra magnipapillata mRNA for PLC- | 1.10E−05 |
| | | | betaH1, complete cds | |
| 966 | 3617.N14.gz43_515391 | AJ249346 | Mus musculus Ankrd2 gene for ankyrin | 1.00E−05 |
| | | | repeat domain 2 (stretch responsive | |
| | | | muscle), exons 1-9 | |
| 967 | 3617.N19.gz43_515471 | U27037 | Fistulina hepatica mitochondrial small | 2.00E−06 |
| | | | subunit ribosomal RNA, mitochondrial | |
| | | | gene, partial sequence | |
| 968 | 3617.P11.gz43_515345 | AK002100 | Homo sapiens cDNA FLJ11238 fis, | 1.20E−13 |
| | | | clone PLACE1008532 | |
| 969 | 3617.P12.gz43_515361 | U04860 | Rattus norvegicus Sprague-Dawley Ah | 8.00E−05 |
| | | | receptor mRNA, complete cds | |
| 970 | 3617.P13.gz43_515377 | AE007356 | Streptococcus pneumoniae section 39 of | 3.80E−05 |
| | | | 194 of the complete genome | |
| 971 | 3620.B03.gz43_515810 | AF238884 | Botrytis virus F, complete genome | 6.00E−06 |
| 972 | 3620.B24.gz43_516146 | AF244812 | Homo sapiens SCAN domain-containing | 1.30E−07 |
| | | | protein 2 (SCAND2) gene, complete cds, | |
| | | | alternatively spliced | |
| 973 | 3620.E12.gz43_515957 | X95301 | D. rerio mRNA for HER-5 protein | 1.00E−06 |
| 974 | 3620.E13.gz43_515973 | X52289 | Human (D21S167) DNA segment | 2.50E−19 |
| | | | containing (GT)19 repeat | |
| 975 | 3620.E17.gz43_516037 | AJ002414 | Arabidosis thaliana mRNA for a hnRNP- | 9.70E−08 |
| | | | like protein | |
| 976 | 3620.E19.gz43_516069 | X16982 | Drosophila melanogaster micropia- | 2.70E−07 |
| | | | Dm11 3′flanking DNA | |
| 977 | 3620.E23.gz43_516133 | Z49438 | S. cerevisiae chromosome X reading | 3.00E−06 |
| | | | frame ORF YJL163c | |
| 978 | 3620.E24.gz43_516149 | M75883 | Human sterol carrier protein X/sterol | 8.00E−06 |
| | | | carrier protein 2 mRNA, complete cds | |
| 979 | 3620.G17.gz43_516039 | U92971 | Human protease-activated receptor 3 | 3.80E−07 |
| | | | (PAR3) mRNA, complete cds | |
| 980 | 3620.G23.gz43_516135 | X66979 | X. laevis mRNA XLFLI | 1.60E−05 |
| 981 | 3620.J18.gz43_516058 | U37373 | Xenopus laevis tail-specific thyroid | 3.00E−06 |
| | | | hormone up-regulated (gene 5) mRNA, | |
| | | | complete cds | |
| 982 | 3620.K19.gz43_516075 | U31780 | Human papillomavirus type 22, complete | 5.00E−06 |
| | | | genome | |
| 983 | 3620.K24.gz43_516155 | M95627 | Homo sapiens angio-associated | 6.00E−06 |
| | | | migratory cell protein (AAMP) mRNA, | |
| | | | complete cds | |
| 984 | 3620.O23.gz43_516143 | L11172 | Plasmodium falciparum RNA | 1.00E−05 |
| | | | polymerase I gene, complete cds | |
| 985 | 3623.B07.gz43_516258 | AF132745 | Mus musculus Sox2 gene, regulatory | 7.70E−07 |
| | | | region sequence | |
| 986 | 3623.E03.gz43_516197 | X82566 | M. musculus glyT1 gene (exon 0a) | 1.80E−09 |
| 987 | 3623.E15.gz43_516389 | AF104420 | Porcine transmissible gastroenteritis | 2.90E−05 |
| | | | virus RNA dependent RNA polymerase | |
| | | | gene, partial cds; virus envelope protein | |
| | | | spike (S), envelope protein (sM), | |
| | | | envelope protein (M), and nucleoprotein | |
| | | | (N) genes, complete cds; and unknown | |
| | | | genes | |
| 988 | 3623.F03.gz43_516198 | AJ009936 | Homo sapiens mRNA for nuclear | 1.70E−05 |
| | | | hormone receptor PRR1 | |
| 989 | 3623.F20.gz43_516470 | U22657 | Mus musculus genomic locus related to | 5.80E−05 |
| | | | cellular morphology | |
| 990 | 3623.G14.gz43_516375 | AB035309 | Paramecium caudatum PcTERT mRNA | 3.00E−06 |
| | | | for telomerase reverse transcriptase, | |
| | | | complete cds | |
| 991 | 3623.H07.gz43_516264 | Z17324 | Homo sapiens of MUC1 gene encoding | 1.80E−07 |
| | | | Mucin | |
| 992 | 3623.H10.gz43_516312 | AB033070 | Homo sapiens mRNA for KIAA1244 | 2.80E−05 |
| | | | protein, partial cds | |
| 993 | 3623.H23.gz43_516520 | AF131763 | Homo sapiens clone 25232 mRNA | 1.70E−05 |
| | | | sequence | |
| 994 | 3623.I08.gz43_516281 | M60421 | Human cytochrome P450scc gene, 5′ end | 2.80E−05 |
| | | | and promoter region | |
| 995 | 3623.I11.gz43_516329 | AK013191 | Mus musculus 10, 11 days embryo | 3.00E−06 |
| | | | cDNA, RIKEN full-length enriched | |
| | | | library, clone: 2810429I04, full insert | |
| | | | sequence | |
| 996 | 3623.L05.gz43_516236 | AJ131991 | Linum usitatissimum target sequence for | 3.00E−06 |
| | | | LIS-1 insertion in P1 | |
| 997 | 3623.L24.gz43_516540 | U09377 | Arabidopsis thaliana GF14chi isoform | 3.00E−06 |
| | | | (GRF1) gene, complete cds | |
| 998 | 3623.M10.gz43_516317 | AF071743 | Homo sapiens topoisomerase II alpha | 4.00E−06 |
| | | | (TOP2A) gene, exons 25, 26, and 27 | |
| 999 | 3623.N23.gz43_516526 | U57489 | Eubacterium sp. VPI 12708 bile acid- | 3.70E−05 |
| | | | inducible operon bile acid-coenzyme A | |
| | | | ligase (baiB), BaiC, BaiD, bile acid 7- | |
| | | | alpha dehydratase (baiE), 3-alpha | |
| | | | hydroxysteroid dehydrogenase (baiA2), | |
| | | | BaiF, bile acid transporter (baiG), | |
| | | | NADH: flavin oxidoreductase (bai> | |
| 1000 | 3623.P22.gz43_516512 | U37761 | Human H1 histamine receptor gene, 5′- | 1.40E−12 |
| | | | flanking region | |
| 1001 | 3626.A10.gz43_516689 | D30745 | Xenopus laevis MRP RNA gene | 2.00E−07 |
| 1002 | 3626.C16.gz43_516787 | AF241271 | Bos taurus ZFY gene, intron | 1.60E−08 |
| 1003 | 3626.E07.gz43_516645 | AF053496 | Caenorhabditis elegans beta chain | 2.00E−06 |
| | | | spectrin homolog Sma1 (sma1) mRNA, | |
| | | | complete cds | |
| 1004 | 3626.F03.gz43_516582 | AJ009771 | Homo sapiens mRNA for putative RING | 2.00E−06 |
| | | | finger protein, partial | |
| 1005 | 3626.G01.gz43_516551 | BC010926 | Homo sapiens, Similar to H4 histone | 1.00E−43 |
| | | | family, member A, clone MGC: 13512 | |
| | | | IMAGE: 4273904, mRNA, complete cds | |
| 1006 | 3626.I20.gz43_516857 | AK025762 | Homo sapiens cDNA: FLJ22109 fis, | 5.80E−07 |
| | | | clone HEP18091 | |
| 1007 | 3626.I23.gz43_516905 | S55615 | (156) = G surface antigen {3′ region, | 3.40E−07 |
| | | | restriction fragment EG4} [Paramecium | |
| | | | primaurelia, Genomic, 407 nt] | |
| 1008 | 3626.M13.gz43_516749 | AE001398 | Plasmodium falciparum chromosome 2, | 4.00E−06 |
| | | | section 35 of 73 of the complete | |
| | | | sequence | |
| 1009 | 3626.M15.gz43_516781 | AF090925 | Homo sapiens clone HQ0452 PRO0452 | 3.10E−07 |
| | | | mRNA, partial cds | |
| 1010 | 3626.N07.gz43_516654 | Z58907 | H. sapiens CpG island DNA genomic | 2.90E−70 |
| | | | Mse1 fragment, clone 116a6, forward | |
| | | | read cpg116a6.ft1a | |
| 1011 | 3626.N24.gz43_516926 | AF041373 | Rattus norvegicus clathrin assembly | 8.90E−08 |
| | | | protein short form (CALM) mRNA, | |
| | | | complete cds | |
| 1012 | 3626.O08.gz43_516671 | D10445 | Mouse mRNA for protein C, complete | 5.00E−06 |
| | | | cds | |
| 1013 | 3626.P11.gz43_516720 | L48479 | Homo sapiens (subclone 6_h1 from P1 | 2.20E−07 |
| | | | H21) DNA sequence | |
| 1014 | 3626.P14.gz43_516768 | X15028 | Chicken hsp90 gene for 90 kDa-heat | 3.80E−05 |
| | | | shock protein 5′-end | |
| 1015 | 3629.A16.gz43_517169 | U16958 | Mus musculus pre-T cell receptor alpha- | 4.00E−06 |
| | | | type chain precursor mRNA, complete | |
| | | | cds | |
| 1016 | 3629.B14.gz43_517138 | X16982 | Drosophila melanogaster micropia- | 2.50E−07 |
| | | | Dm11 3′flanking DNA | |
| 1017 | 3629.C14.gz43_517139 | Z22537 | C. parvum precursor of oocyst wall | 5.00E−06 |
| | | | protein | |
| 1018 | 3629.E01.gz43_516933 | D00621 | Sus scrofa gene for follicle stimulation | 3.50E−05 |
| | | | hormone beta subunit, exons 1, 2, 3, | |
| | | | complete cds | |
| 1019 | 3629.E20.gz43_517237 | AE006900 | Sulfolobus solfataricus section 259 of | 9.00E−06 |
| | | | 272 of the complete genome | |
| 1020 | 3629.F24.gz43_517302 | Y10531 | Clostridium perfringens sod gene for | 2.00E−06 |
| | | | superoxide dismutase | |
| 1021 | 3629.H10.gz43_517080 | J03654 | Human immunodeficiency virus type 2, | 8.00E−06 |
| | | | isolate HIV2FG | |
| 1022 | 3629.H12.gz43_517112 | AF017266 | Danio rerio glutamate decarboxylase | 6.50E−07 |
| | | | (GAD67) mRNA, partial cds | |
| 1023 | 3629.I11.gz43_517097 | AF020810 | Salmonella enterica VirK (virK), Mig-14 | 3.00E−06 |
| | | | (mig-14), NxiA (nxiA), TctE (tctE), | |
| | | | TctD (tctD), TctC (tctC), TctB (tctB), | |
| | | | and TctA (tctA) genes, complete cds; | |
| | | | and O360 (o360) gene, partial cds | |
| 1024 | 3629.I16.gz43_517177 | AE007643 | Clostridium acetobutylicum ATCC824 | 4.40E−05 |
| | | | section 131 of 356 of the complete | |
| | | | genome | |
| 1025 | 3629.J03.gz43_516970 | AB017511 | Hydra magnipapillata mRNA for PLC- | 1.10E−05 |
| | | | betaH1, complete cds | |
| 1026 | 3629.J07.gz43_517034 | M20782 | Human alpha-2-plasmin inhibitor gene, | 2.90E−11 |
| | | | exons 2 to 5 | |
| 1027 | 3632.C11.gz43_517475 | AF026148 | Perilla frutescens beta-ketoacyl-ACP | 1.00E−06 |
| | | | synthase I (KAS I) mRNA, complete cds | |
| 1028 | 3632.C17.gz43_517571 | U50534 | Human BRCA2 region, mRNA sequence | 1.00E−05 |
| | | | CG003 | |
| 1029 | 3632.F07.gz43_517414 | M12036 | Human tyrosine kinase-type receptor | 4.70E−10 |
| | | | (HER2) gene, partial cds | |
| 1030 | 3632.G01.gz43_517319 | AC006621 | Caenorhabditis elegans cosmid C52A10, | 3.40E−05 |
| | | | complete sequence | |
| 1031 | 3632.I20.gz43_517625 | AK024381 | Homo sapiens cDNA FLJ14319 fis, | 9.00E−06 |
| | | | clone PLACE3000406 | |
| 1032 | 3632.K20.gz43_517627 | M27634 | Vaccinia virus P4a major core protein | 9.60E−05 |
| | | | gene, complete cds | |
| 1033 | 3632.M08.gz43_517437 | X75304 | H. sapiens giantin mRNA | 8.00E−06 |
| 1034 | 3632.M13.gz43_517517 | U18191 | Human HLA class I genomic survey | 3.20E−07 |
| | | | sequence | |
| 1035 | 3632.M19.gz43_517613 | AF012131 | Homo sapiens brachyury variant B | 3.70E−07 |
| | | | (TBX1) mRNA, complete cds | |
| 1036 | 3632.N13.gz43_517518 | AF287491 | Oncorhynchus mykiss MHC class I | 2.00E−06 |
| | | | heavy chain precursor (Onmy-UBA) | |
| | | | mRNA, Onmy-UBA*601 allele, | |
| | | | complete cds | |
| 1037 | 3632.N21.gz43_517646 | X62423 | P. falciparum pol delta gene for DNA | 4.00E−06 |
| | | | polymerase delta | |
| 1038 | 3632.O06.gz43_517407 | BC009868 | Homo sapiens, replication protein A3 | 1.40E−18 |
| | | | (14 kD), clone MGC: 16404 | |
| | | | IMAGE: 3940438, mRNA, complete cds | |
| 1039 | 3632.P07.gz43_517424 | AE001066 | Archaeoglobus fulgidus section 41 of | 3.00E−06 |
| | | | 172 of the complete genome | |
| 1040 | 3635.A06.gz43_517777 | AK005546 | Mus musculus adult female placenta | 1.40E−07 |
| | | | cDNA, RIKEN full-length enriched | |
| | | | library, clone: 1600027G01, full insert | |
| | | | sequence | |
| 1041 | 3635.A08.gz43_517809 | Z49280 | S. cerevisiae chromosome X reading | 6.00E−06 |
| | | | frame ORF YJL005w | |
| 1042 | 3635.A13.gz43_517889 | AF143236 | Homo sapiens apoptosis related protein | 2.00E−06 |
| | | | APR-2 mRNA, complete cds | |
| 1043 | 3635.D07.gz43_517796 | M58150 | Bovine lactoperoxidase (LPO) mRNA, | 3.10E−05 |
| | | | complete cds | |
| 1044 | 3635.F01.gz43_517702 | Y19128 | Homo sapiens enteropeptidase gene, | 3.00E−09 |
| | | | exon 6 | |
| 1045 | 3635.F06.gz43_517782 | X63073 | Pseudanabaena sp. cpeBA operon | 1.50E−05 |
| | | | encoding phycoerythrin beta and alpha | |
| | | | subunits | |
| 1046 | 3635.F10.gz43_517846 | AF107688 | Aedes aegypti clone 431 Feilai family of | 3.50E−05 |
| | | | SINES | |
| 1047 | 3635.H20.gz43_518008 | AE000613 | Helicobacter pylori 26695 section 91 of | 1.10E−05 |
| | | | 134 of the complete genome | |
| 1048 | 3635.J06.gz43_517786 | U15018 | Dugbe virus L protein gene, complete | 1.10E−05 |
| | | | cds | |
| 1049 | 3635.J09.gz43_517834 | X85444 | G. pallida repetitive DNA element | 2.10E−08 |
| 1050 | 3635.K05.gz43_517771 | AF090432 | Danio rerio serrateB mRNA, complete | 4.00E−06 |
| | | | cds | |
| 1051 | 3635.K06.gz43_517787 | AJ276631 | Capsicum annuum partial kn gene for | 6.10E−07 |
| | | | Knolle protein, promoter region | |
| 1052 | 3635.M18.gz43_517981 | AL591498 | Human DNA sequence from clone | 1.40E−05 |
| | | | RP11-113L12 on chromosome 13, | |
| | | | complete sequence [Homo sapiens] | |
| 1053 | 3635.O01.gz43_517711 | AF081788 | Homo sapiens putative spliceosome | 3.70E−30 |
| | | | associated protein mRNA, complete cds | |
| 1054 | 3635.O14.gz43_517919 | X72224 | S. cerevisiae genes HSS1, NPL4 and HSP | 6.00E−06 |
| 1055 | 3635.P17.gz43_517968 | AF242307 | Euphorbia esula sucrose transport protein | 2.90E−10 |
| | | | mRNA, complete cds | |
| 1056 | 3635.P18.gz43_517984 | AF078780 | Caenorhabditis elegans cosmid C04F2, | 1.74E−04 |
| | | | complete sequence | |
| 1057 | 3638.A02.gz43_518097 | M17988 | Spiroplasma virus 4 (SpV4) replicative | 4.00E−06 |
| | | | form, complete genome | |
| 1058 | 3638.A24.gz43_518449 | AF064079 | Plasmodium gallinaceum endochitinase | 1.60E−07 |
| | | | precursor, mRNA, complete cds | |
| 1059 | 3638.F15.gz43_518310 | AJ297538 | Homo sapiens partial RARA gene, intron 2 | 4.00E−06 |
| 1060 | 3638.H07.gz43_518184 | AK026258 | Homo sapiens cDNA: FLJ22605 fis, | 2.00E−06 |
| | | | clone HSI04743 | |
| 1061 | 3638.J09.gz43_518218 | U89651 | Homo sapiens matrix metalloproteinase | 8.10E−08 |
| | | | MMP Rasi-1 gene, promoter region | |
| 1062 | 3638.K06.gz43_518171 | AL139329 | Human DNA sequence from clone | 4.40E−11 |
| | | | RP11-228P1 on chromosome 6, | |
| | | | complete sequence [Homo sapiens] | |
| 1063 | 3638.L10.gz43_518236 | D26532 | Mouse mRNA for transcription factor | 2.00E−08 |
| | | | PEBP2aB2, complete cds | |
| 1064 | 3638.N05.gz43_518158 | X62294 | B. taurus mRNA for adrenal angiotensin | 9.00E−06 |
| | | | II type-1 receptor | |
| 1065 | 3643.D21.gz43_518788 | U17010 | Allomyces macrogynus mitochondrion | 1.80E−05 |
| | | | NADH dehydrogenase subunit 5 (nad5) | |
| | | | gene, complete cds | |
| 1066 | 3643.E24.gz43_518837 | AL022342 | Human DNA sequence from clone RP1- | 6.70E−05 |
| | | | 29M10 on chromosome 20, complete | |
| | | | sequence [Homo sapiens] | |
| 1067 | 3643.F07.gz43_518566 | M73962 | Bovine pregnancy-associated | 6.00E−06 |
| | | | glycoprotein 1 mRNA, complete cds | |
| 1068 | 3643.G20.gz43_518775 | AF191214 | Homo sapiens isovaleryl dehydrogenase | 1.00E−05 |
| | | | (IVD) gene, exons 1-3 | |
| 1069 | 3643.G24.gz43_518839 | AK025682 | Homo sapiens cDNA: FLJ22029 fis, | 6.00E−06 |
| | | | clone HEP08661 | |
| 1070 | 3643.H09.gz43_518600 | AK024381 | Homo sapiens cDNA FLJ14319 fis, | 1.70E−05 |
| | | | clone PLACE3000406 | |
| 1071 | 3643.I01.gz43_518473 | AF000306 | Brassica napus steroid sulfotransferase 2 | 3.00E−06 |
| | | | gene, complete cds | |
| 1072 | 3643.I02.gz43_518489 | X58433 | B. subtillis cad gene for lysine | 2.30E−05 |
| | | | decarboxylase | |
| 1073 | 3643.I18.gz43_518745 | M14872 | Mouse GnRH-GAP gene encoding | 4.00E−06 |
| | | | gonadotropin-releasing hormone and GnRH- | |
| | | | associated peptide (GAP) | |
| 1074 | 3643.I24.gz43_518841 | BC003813 | Mus musculus, clone MGC: 6139 | 2.30E−07 |
| | | | IMAGE: 3487295, mRNA, complete cds | |
| 1075 | 3643.K06.gz43_518555 | AL050124 | Homo sapiens mRNA; cDNA | 1.60E−07 |
| | | | DKFZp586E151 (from clone | |
| | | | DKFZp586E151) | |
| 1076 | 3643.L01.gz43_518476 | AJ278429 | Mus musculus partial Prkar1a gene for | 3.00E−06 |
| | | | cAMP-dependent protein kinase | |
| | | | regulatory subunit RIalpha, exons 8-10 | |
| | | | and 3′UTR | |
| 1077 | 3643.N24.gz43_518846 | BC006511 | Homo sapiens, clone IMAGE: 3010441, | 1.00E−05 |
| | | | mRNA | |
| 1078 | 3643.O16.gz43_518719 | AE002303 | Chlamydia muridarum, section 34 of 85 | 1.10E−05 |
| | | | of the complete genome | |
| 1079 | 3643.O18.gz43_518751 | V00248 | Drosophila gene for yolk protein I | 2.00E−06 |
| | | | (vitellogenin) | |
| 1080 | 3643.O21.gz43_518799 | AE000614 | Helicobacter pylori 26695 section 92 of | 1.40E−05 |
| | | | 134 of the complete genome | |
| 1081 | 3643.P13.gz43_518672 | Y17693 | Bungarus multicinctus gene encoding | 2.00E−07 |
| | | | alpha-bungarotoxin, V31 variant | |
| 1082 | 3643.P14.gz43_518688 | AF109352 | Euperipatoides rowelli microsatellite P18 | 8.80E−10 |
| | | | sequence | |
| 1083 | 3646.A07.gz43_518945 | X55137 | H. giganteus type II restriction- | 3.00E−06 |
| | | | modification system HgiBI | |
| 1084 | 3646.A09.gz43_518977 | AF074963 | Rattus norvegicus endothelin-B receptor | 2.10E−07 |
| | | | (EDNRB) gene, partial cds | |
| 1085 | 3646.A12.gz43_519025 | AF176208 | Homo sapiens EcoRI-HindIII fragment | 1.60E−05 |
| | | | upstream of exon 1 of the c-myc gene | |
| 1086 | 3646.A13.gz43_519041 | X89445 | O. chalybea DNA for narB gene and | 4.00E−05 |
| | | | partial ORFs | |
| 1087 | 3646.B20.gz43_519154 | M86514 | Rat proline-rich protein mRNA, 3′ end | 1.60E−05 |
| 1088 | 3646.C06.gz43_518931 | Z71180 | Caenorhabditis elegans cosmid F22E12, | 2.03E−04 |
| | | | complete sequence | |
| 1089 | 3646.C16.gz43_519091 | U73608 | Hepatitis B virus, genome 7648 with G- | 2.30E−05 |
| | | | >A hypermutations | |
| 1090 | 3646.E02.gz43_518869 | U11683 | Trypanoplasma borreli Tt-JH | 8.10E−07 |
| | | | mitochondrion cytochrome c oxidase | |
| | | | subunit 1 (cox1) gene, complete cds | |
| 1091 | 3646.E20.gz43_519157 | AE006216 | Pasteurella multocida PM70 section 183 | 2.30E−05 |
| | | | of 204 of the complete genome | |
| 1092 | 3646.H04.gz43_518904 | AF043740 | Branchiostoma floridae amphioxus Otx | 2.00E−06 |
| | | | transcription factor (Otx) mRNA, | |
| | | | complete cds | |
| 1093 | 3646.H09.gz43_518984 | AP000145 | Homo sapiens genomic DNA, | 2.90E−40 |
| | | | chromosome 21q21.2, LL56-APP region, | |
| | | | clone B2291C14-R44F3, segment 10/10, | |
| | | | complete sequence | |
| 1094 | 3646.H16.gz43_519096 | U22342 | Bacteriophage T270 integrase (int) gene, | 1.00E−07 |
| | | | complete cds | |
| 1095 | 3646.I01.gz43_518857 | X54486 | Human gene for C1-inhibitor | 6.80E−05 |
| 1096 | 3646.J03.gz43_518890 | AB055372 | Macaca fascicularis brain cDNA, | 5.40E−190 |
| | | | clone: QflA-12842 | |
| 1097 | 3646.J22.gz43_519194 | AL133032 | Homo sapiens mRNA; cDNA | 2.00E−06 |
| | | | DKFZp586B0317 (from clone | |
| | | | DKFZp586B0317) | |
| 1098 | 3646.K14.gz43_519067 | AF239178 | Paracoccidioides brasiliensis lon | 4.00E−06 |
| | | | proteinase gene, complete cds; nuclear | |
| | | | gene for mitochondrial product | |
| 1099 | 3646.L17.gz43_519116 | Z58907 | H. sapiens CpG island DNA genomic | 2.50E−70 |
| | | | Mse1 fragment, clone 116a6, forward | |
| | | | read cpg116a6.ft1a | |
| 1100 | 3646.O13.gz43_519055 | AL050391 | Homo sapiens mRNA; cDNA | 5.20E−08 |
| | | | DKFZp586A181 (from clone | |
| | | | DKFZp586A181); partial cds | |
| 1101 | 3646.O16.gz43_519103 | X00331 | Drosophila virilis simple DNA sequence | 5.20E−08 |
| | | | (pDV-161) | |
| 1102 | 3646.P09.gz43_518992 | U04527 | Borrelia burgdorferi 212 DNA gyrase b | 5.00E−06 |
| | | | subunit (gyrB) and ribonuclease P | |
| | | | protein component (rnpA) genes, partial | |
| | | | cds, DnaA protein (dnaA), DNA | |
| | | | polymerase III beta subunit (dnaN), and | |
| | | | ribosomal protein L34 (rpmH) genes, | |
| | | | complete cds | |
| 1103 | 3646.P14.gz43_519072 | AY032863 | Mus musculus chloride-formate | 8.00E−06 |
| | | | exchanger mRNA, complete cds | |
| 1104 | 3646.P17.gz43_519120 | U19569 | Human squamous cell carcinoma antigen | 1.20E−07 |
| | | | (SCCA2) gene, exon 1 | |
| 1105 | 3661.A08.gz43_519483 | AB017511 | Hydra magnipapillata mRNA for PLC- | 1.20E−05 |
| | | | betaH1, complete cds | |
| 1106 | 3661.D17.gz43_519630 | J03488 | Reovirus type 3 L2 gene encoding | 3.00E−06 |
| | | | guanylyltransferase, complete cds | |
| 1107 | 3661.D18.gz43_519646 | AB033024 | Homo sapiens mRNA for KIAA1198 | 1.90E−11 |
| | | | protein, partial cds | |
| 1108 | 3661.E19.gz43_519663 | AB014084 | Homo sapiens genomic DNA, | 6.00E−05 |
| | | | chromosome 6p21.3, HLA class I region, | |
| | | | Cosmid clone: TY7A5, complete | |
| | | | sequence | |
| 1109 | 3661.E23.gz43_519727 | AE001032 | Archaeoglobus fulgidus section 75 of | 5.30E−05 |
| | | | 172 of the complete genome | |
| 1110 | 3661.F14.gz43_519584 | X15063 | Plasmodium falciparum mRNA for | 6.80E−05 |
| | | | major merozoite surface antigen gp195 | |
| 1111 | 3661.G16.gz43_519617 | AF255609 | Homo sapiens high mobility group | 2.70E−07 |
| | | | protein HMG1 gene, exons 1 and 2, | |
| | | | partial cds | |
| 1112 | 3661.G20.gz43_519681 | AK021558 | Homo sapiens cDNA FLJ11496 fis, | 6.40E−09 |
| | | | clone HEMBA1001964 | |
| 1113 | 3661.H11.gz43_519538 | Z30705 | Puumala virus (Evo/15Cg/93) gene for N | 3.90E−07 |
| | | | protein | |
| 1114 | 3661.H24.gz43_519746 | X66979 | X. laevis mRNA XLFLI | 1.60E−05 |
| 1115 | 3661.I22.gz43_519715 | AF029887 | Caenorhabditis elegans UNC-129 (unc- | 5.00E−06 |
| | | | 129) mRNA, complete cds | |
| 1116 | 3661.J15.gz43_519604 | AJ297538 | Homo sapiens partial RARA gene, intron 2 | 4.00E−06 |
| 1117 | 3661.K22.gz43_519717 | AK002100 | Homo sapiens cDNA FLJ11238 fis, | 1.30E−13 |
| | | | clone PLACE1008532 | |
| 1118 | 3661.L19.gz43_519670 | AL589643 | Human DNA sequence from clone | 2.20E−05 |
| | | | RP11-344C1 on chromosome 6, | |
| | | | complete sequence [Homo sapiens] | |
| 1119 | 3661.M03.gz43_519415 | Z57613 | H. sapiens CpG island DNA genomic | 1.20E−08 |
| | | | Mse1 fragment, clone 187a12, forward | |
| | | | read cpg187a12.ft1a | |
| 1120 | 3661.M23.gz43_519735 | X79547 | Equus caballus mitochondrial DNA | 5.80E−05 |
| | | | complete sequence | |
| 1121 | 3661.P22.gz43_519722 | AF055668 | Mus musculus apoptosis-linked gene 4, | 8.00E−06 |
| | | | deltaC form (Alg-4) mRNA, partial cds | |
| 1122 | 3662.A13.gz43_519947 | Z49438 | S. cerevisiae chromosome X reading | 3.00E−06 |
| | | | frame ORF YJL163c | |
| 1123 | 3662.B13.gz43_519948 | AB045237 | Xenopus laevis XRPTPb mRNA for | 7.00E−06 |
| | | | receptor-type protein tyrosine | |
| | | | phosphatase beta.11, complete cds | |
| 1124 | 3662.C10.gz43_519901 | BC007905 | Homo sapiens, Similar to retinal | 1.20E−09 |
| | | | degeneration B beta, clone MGC: 14375 | |
| | | | IMAGE: 4299595, mRNA, complete cds | |
| 1125 | 3662.C15.gz43_519981 | M33864 | Human (cline HGL-3) interstitial | 1.20E−05 |
| | | | retinoid-binding protein 3 (RBP3) gene, | |
| | | | exon 1 | |
| 1126 | 3662.F13.gz43_519952 | AB040935 | Homo sapiens mRNA for KIAA1502 | 1.20E−61 |
| | | | protein, partial cds | |
| 1127 | 3662.H14.gz43_519970 | AB032757 | Mus musculus gad65 gene for glutamate | 8.00E−07 |
| | | | decarboxylase 65, partial cds | |
| 1128 | 3662.H23.gz43_520114 | AK013013 | Mus musculus 10, 11 days embryo | 2.00E−06 |
| | | | cDNA, RIKEN full-length enriched | |
| | | | library, clone: 2810406L04, full insert | |
| | | | sequence | |
| 1129 | 3662.H24.gz43_520130 | D45371 | Human apM1 mRNA for GS3109 (novel | 9.60E−10 |
| | | | adipose specific collagen-like factor), | |
| | | | complete cds | |
| 1130 | 3662.J05.gz43_519828 | M83554 | H. sapiens lymphocyte activation antigen | 1.40E−05 |
| | | | CD30 mRNA, complete cds | |
| 1131 | 3662.J08.gz43_519876 | Z11876 | B. hermsii vmp7 gene encoding Vmp7 | 1.11E−04 |
| | | | outer membrane lipoprotein | |
| 1132 | 3662.J09.gz43_519892 | AB011101 | Homo sapiens mRNA for KIAA0529 | 6.30E−05 |
| | | | protein, partial cds | |
| 1133 | 3662.J16.gz43_520004 | U00484 | Anabaena PCC7120 protein kinase PknA | 2.00E−06 |
| | | | (pknA) gene, complete cds | |
| 1134 | 3662.K03.gz43_519797 | AL390145 | Homo sapiens mRNA; cDNA | 1.40E−05 |
| | | | DKFZp762C115 (from clone | |
| | | | DKFZp762C115) | |
| 1135 | 3662.L05.gz43_519830 | U63635 | Schizosaccharomyces pombe RNA lariat | 5.80E−10 |
| | | | debranching enzyme (Sp-dbr1) gene, | |
| | | | complete cds | |
| 1136 | 3662.N24.gz43_520136 | Z30709 | L. helveticus genes for prolinase and | 3.70E−05 |
| | | | putative ABC transporter | |
| 1137 | 3662.O02.gz43_519785 | AF084460 | Gallus gallus potassium channel Shaker | 6.90E−05 |
| | | | alpha subunit variant cKv1.4(m) | |
| | | | mRNA, complete cds | |
| 1138 | 3662.P03.gz43_519802 | AJ011456 | Schinziella tetragona matK gene | 7.20E−08 |
| | | | (corresponding location in Tobacco: 963-1244) | |
| 1139 | 3663.A09.gz43_520267 | Z69608 | A. rara SSU rRNA gene (partial) | 3.30E−07 |
| 1140 | 3663.C08.gz43_520253 | Z50756 | Caenorhabditis elegans cosmid T08D10, | 7.60E−07 |
| | | | complete sequence | |
| 1141 | 3663.C19.gz43_520429 | Z22672 | H. sapiens cacnl1a3 gene encoding | 2.80E−07 |
| | | | skeletal muscle dhp-receptor alpha 1 | |
| | | | subunit | |
| 1142 | 3663.E04.gz43_520191 | U89318 | Homo sapiens nucleophosmin | 2.60E−07 |
| | | | phosphoprotein (NPM) gene, intron 9, | |
| | | | partial sequence | |
| 1143 | 3663.F15.gz43_520368 | U66073 | Tritrichomonas foetus putative | 9.20E−07 |
| | | | superoxide dismutase 1 (SOD1) gene, | |
| | | | complete cds | |
| 1144 | 3663.F22.gz43_520480 | U36786 | Rattus norvegicus putative pheromone | 7.10E−07 |
| | | | receptor VN7 mRNA, complete cds | |
| 1145 | 3663.G01.gz43_520145 | AK024359 | Homo sapiens cDNA FLJ14297 fis, | 9.50E−36 |
| | | | clone PLACE1008941 | |
| 1146 | 3663.G08.gz43_520257 | L19339 | Molgula oculata zinc finger protein | 5.20E−07 |
| | | | (manx) mRNA, complete cds | |
| 1147 | 3663.H20.gz43_520450 | X61307 | Staphylococcus aureus spa gene for | 5.00E−06 |
| | | | protein A | |
| 1148 | 3663.J06.gz43_520228 | AE007916 | Agrobacterium tumefaciens strain C58 | 2.02E−04 |
| | | | plasmid AT, section 44 of 50 of the | |
| | | | complete sequence | |
| 1149 | 3663.J16.gz43_520388 | U38181 | Leuconostoc mesenteroides | 3.90E−07 |
| | | | dextransucrase gene, complete cds | |
| 1150 | 3663.K02.gz43_520165 | X68339 | Mycoplasma-like organism (substrain | 5.00E−06 |
| | | | ASHY) DNA for 16S rRNA | |
| 1151 | 3663.K13.gz43_520341 | AF155221 | Mus musculus matrix metalloproteinase | 2.00E−06 |
| | | | 19 (Mmp19) mRNA, complete cds | |
| 1152 | 3663.L18.gz43_520422 | AB031056 | Solobacterium moorei gene for 16S | 1.00E−06 |
| | | | rRNA, isolate: RCA59-74 | |
| 1153 | 3663.L24.gz43_520518 | D10445 | Mouse mRNA for protein C, complete | 6.00E−06 |
| | | | cds | |
| 1154 | 3663.M24.gz43_520519 | AE001196 | Treponema pallidum section 12 of 87 of | 5.20E−05 |
| | | | the complete genome | |
| 1155 | 3663.N09.gz43_520280 | AF081788 | Homo sapiens putative spliceosome | 4.00E−20 |
| | | | associated protein mRNA, complete cds | |
| 1156 | 3663.N10.gz43_520296 | X62423 | P. falciparum pol delta gene for DNA | 4.00E−06 |
| | | | polymerase delta | |
| 1157 | 3663.N12.gz43_520328 | AF178079 | Zygosaccharomyces rouxii ketoreductase | 5.00E−06 |
| | | | (krd) mRNA, complete cds | |
| 1158 | 3663.N16.gz43_520392 | U41060 | Homo sapiens estrogen regulated LIV-1 | 2.00E−06 |
| | | | protein (LIV-1) mRNA, complete cds | |
| 1159 | 3663.O07.gz43_520249 | D00442 | Grapevine fanleaf virus satellite RNA | 1.50E−08 |
| | | | (RNA3), complete cds | |
| 1160 | 3663.O09.gz43_520281 | AK002141 | Homo sapiens cDNA FLJ11279 fis, | 5.30E−10 |
| | | | clone PLACE1009444, highly similar to | |
| | | | PHOSPHATIDYLINOSITOL 4- | |
| | | | KINASE ALPHA (EC 2.7.1.67) | |
| 1161 | 3664.A11.gz43_520683 | U67525 | Methanococcus jannaschii section 67 of | 4.00E−06 |
| | | | 150 of the complete genome | |
| 1162 | 3664.C21.gz43_520845 | AF064773 | Staphylococcus aureus extracellular | 1.30E−07 |
| | | | enterotoxin type G precursor (SEG) | |
| | | | gene, complete cds | |
| 1163 | 3664.D06.gz43_520606 | AF178079 | Zygosaccharomyces rouxii ketoreductase | 5.00E−06 |
| | | | (krd) mRNA, complete cds | |
| 1164 | 3664.D12.gz43_520702 | U10519 | Human DNA polymerase beta gene, | 2.00E−07 |
| | | | exon 5 | |
| 1165 | 3664.D17.gz43_520782 | AK027226 | Homo sapiens cDNA: FLJ23573 fis, | 4.90E−07 |
| | | | clone LNG12520 | |
| 1166 | 3664.E18.gz43_520799 | AF317204 | Mus musculus C-type lectin superfamily | 3.20E−05 |
| | | | 1 gene, complete cds | |
| 1167 | 3664.E23.gz43_520879 | AB050903 | Mus musculus mRNA for a4 subunit | 3.00E−06 |
| | | | isoform, complete cds | |
| 1168 | 3664.E24.gz43_520895 | Z92793 | Caenorhabditis elegans cosmid H15M21, | 1.20E−05 |
| | | | complete sequence | |
| 1169 | 3664.G12.gz43_520705 | AF211482 | Dictyostelium discoideum SdhA (sdhA) | 2.30E−09 |
| | | | gene, complete cds | |
| 1170 | 3664.G20.gz43_520833 | M14450 | Rat thyrotropin (TSH) beta-subunit gene, | 4.00E−06 |
| | | | exons 2 and 3 | |
| 1171 | 3664.H15.gz43_520754 | Y11270 | E. histolytica INO1 gene | 2.00E−06 |
| 1172 | 3664.H22.gz43_520866 | X97773 | B. taurus mRNA for mitochondrial | 1.20E−05 |
| | | | tricarboxylate carrier protein | |
| 1173 | 3664.J12.gz43_520708 | M58150 | Bovine lactoperoxidase (LPO) mRNA, | 3.20E−05 |
| | | | complete cds | |
| 1174 | 3664.J23.gz43_520884 | U67463 | Methanococcus jannaschii section 5 of | 3.00E−06 |
| | | | 150 of the complete genome | |
| 1175 | 3664.K16.gz43_520773 | Z83118 | Caenorhabditis elegans cosmid M04D5, | 2.70E−07 |
| | | | complete sequence | |
| 1176 | 3664.K19.gz43_520821 | U36927 | Plasmodium yoelii rhoptry protein gene, | 3.00E−05 |
| | | | complete cds | |
| 1177 | 3664.L21.gz43_520854 | AF057695 | Haemophilus ducreyi strain 35000 | 2.15E−04 |
| | | | putative phosphomannomutase (pmm) | |
| | | | gene, partial cds; large supernatant | |
| | | | protein 1 (lspA1) gene, complete cds; | |
| | | | and putative GMP synthase (guaA) gene, | |
| | | | partial cds | |
| 1178 | 3664.O22.gz43_520873 | U43574 | Hydra vulgaris nucleoporin p62 gene, | 7.00E−06 |
| | | | complete cds | |
| 1179 | 3664.P12.gz43_520714 | AF030883 | Mus musculus tRNA-His gene, complete | 9.00E−06 |
| | | | sequence; platelet-activating factor | |
| | | | acetylhydrolase Ib alpha subunit (Pafaha- | |
| | | | psl) pseudogene, complete sequence; | |
| | | | and tRNA-Glu gene, complete sequence | |
| 1180 | 3664.P18.gz43_520810 | Z47735 | H. sapiens NFKB1 gene, exons 11 & 12 | 1.32E−04 |
| 1181 | 3665.A23.gz43_521259 | X66979 | X. laevis mRNA XLFLI | 1.60E−05 |
| 1182 | 3665.B01.gz43_520908 | M90058 | Human serglycin gene, exons 1, 2, and 3 | 4.00E−06 |
| 1183 | 3665.B12.gz43_521084 | AK020877 | Mus musculus adult retina cDNA, | 7.10E−07 |
| | | | RIKEN full-length enriched library, | |
| | | | clone: A930019H03, full insert sequence | |
| 1184 | 3665.E11.gz43_521071 | AB024030 | Arabidopsis thaliana genomic DNA, | 9.00E−06 |
| | | | chromosome 5, TAC clone: K5A21 | |
| 1185 | 3665.E20.gz43_521215 | X76584 | H. sapiens simple DNA sequence region | 6.80E−08 |
| | | | clone wg1h1 | |
| 1186 | 3665.H20.gz43_521218 | X95301 | D. rerio mRNA for HER-5 protein | 9.50E−07 |
| 1187 | 3665.K01.gz43_520917 | X04653 | Mouse mRNA for Ly-6 alloantigen (Ly- | 1.30E−05 |
| | | | 6E.1) | |
| 1188 | 3665.M01.gz43_520919 | AF098352 | Wiseana copularis haplotype southern | 5.80E−07 |
| | | | cytochrome oxidase subunit I and | |
| | | | cytochrome oxidase subunit II genes, | |
| | | | partial cds; mitochondrial genes for | |
| | | | mitochondrial products | |
| 1189 | 3665.M21.gz43_521239 | AF257480 | Rana temporaria microsatellite SB80 | 3.30E−09 |
| | | | sequence | |
| 1190 | 3665.M23.gz43_521271 | Y10623 | C. pallidivittatus globin gene cluster E | 1.10E−05 |
| 1191 | 3665.N24.gz43_521288 | X95301 | D. rerio mRNA for HER-5 protein | 1.00E−06 |
| 1192 | 3665.O06.gz43_521001 | AE007033 | Mycobacterium tuberculosis CDC1551, | 7.40E−05 |
| | | | section 119 of 280 of the complete | |
| | | | genome | |
| 1193 | 3665.O14.gz43_521129 | AB033094 | Homo sapiens mRNA for KIAA1268 | 2.10E−08 |
| | | | protein, partial cds | |
| 1194 | 3665.O15.gz43_521145 | AK004557 | Mus musculus adult male lung cDNA, | 1.20E−05 |
| | | | RIKEN full-length enriched library, | |
| | | | clone: 1200003C23, full insert sequence | |
| 1195 | 3665.O19.gz43_521209 | AY036905 | Trichoderma atroviride protein GTPase | 2.10E−08 |
| | | | Tga1 (tga1) gene, complete cds | |
| 1196 | 3665.O21.gz43_521241 | U89293 | Homo sapiens MSH4 (HMSH4) mRNA, | 1.20E−39 |
| | | | complete cds | |
| 1197 | 3665.O23.gz43_521273 | X00048 | Herpes simplex virus (HSV) type 2 | 6.00E−06 |
| | | | transforming region mtr-2 (map | |
| | | | coordinates 0.580-0.625) | |
| 1198 | 3665.P13.gz43_521114 | Z48796 | H. sapiens Ski-W mRNA for helicase | 1.70E−05 |
| 1199 | 3666.A07.gz43_521387 | AK005546 | Mus musculus adult female placenta | 1.20E−07 |
| | | | cDNA, RIKEN full-length enriched | |
| | | | library, clone: 1600027G01, full insert | |
| | | | sequence | |
| 1200 | 3666.A19.gz43_521579 | AB011101 | Homo sapiens mRNA for KIAA0529 | 5.80E−05 |
| | | | protein, partial cds | |
| 1201 | 3666.A24.gz43_521659 | AL050208 | Homo sapiens mRNA; cDNA | 2.90E−07 |
| | | | DKFZp586F2323 (from clone | |
| | | | DKFZp586F2323) | |
| 1202 | 3666.B11.gz43_521452 | X06932 | Petunia hsp70 gene | 3.00E−06 |
| 1203 | 3666.C18.gz43_521565 | Z22672 | H. sapiens cacnl1a3 gene encoding | 2.80E−07 |
| | | | skeletal muscle dhp-receptor alpha 1 | |
| | | | subunit | |
| 1204 | 3666.D02.gz43_521310 | AJ297538 | Homo sapiens partial RARA gene, intron 2 | 4.00E−06 |
| 1205 | 3666.D11.gz43_521454 | AF057695 | Haemophilus ducreyi strain 35000 | 2.43E−04 |
| | | | putative phosphomannomutase (pmm) | |
| | | | gene, partial cds; large supernatant | |
| | | | protein 1 (lspA1) gene, complete cds; | |
| | | | and putative GMP synthase (guaA) gene, | |
| | | | partial cds | |
| 1206 | 3666.D15.gz43_521518 | Z66194 | H. sapiens CpG island DNA genomic | 1.70E−66 |
| | | | Mse1 fragment, clone 80b12, forward | |
| | | | read cpg80b12.ft1b | |
| 1207 | 3666.D16.gz43_521534 | Z66194 | H. sapiens CpG island DNA genomic | 2.10E−37 |
| | | | Mse1 fragment, clone 80b12, forward | |
| | | | read cpg80b12.ft1b | |
| 1208 | 3666.F22.gz43_521632 | U97062 | Staphylococcus aureus NCTC 8325 | 1.20E−08 |
| | | | SecA (secA) gene, complete cds | |
| 1209 | 3666.G12.gz43_521473 | J03901 | Maize pyruvate, orthophosphate dikinase | 1.72E−04 |
| | | | mRNA, complete cds | |
| 1210 | 3666.I12.gz43_521475 | AJ225102 | Pinus lambertiana chloroplast DNA | 6.40E−10 |
| | | | containing a SSR Black Hills (Oregon) | |
| 1211 | 3666.L01.gz43_521302 | M86227 | Staphylococcus aureus DNA gyrase B | 5.00E−06 |
| | | | subunit (gyrB) RecF homologue (recF) | |
| | | | and DNA gyrase A subunit (gyrA) gene, | |
| | | | complete cds | |
| 1212 | 3666.L06.gz43_521382 | AF224725 | Trichosurus vulpecula retrovirus TvERV | 3.30E−08 |
| | | | (type D) gag polyprotein (gag), protease | |
| | | | (pro), and pol polyprotein (pol) genes, | |
| | | | complete cds | |
| 1213 | 3666.L11.gz43_521462 | AF147081 | Homo sapiens gamma-glutamyl | 3.30E−05 |
| | | | hydrolase gene, exons 1 and 2 | |
| 1214 | 3666.L23.gz43_521654 | AK020701 | Mus musculus 6 days neonate skin | 2.20E−07 |
| | | | cDNA, RIKEN full-length enriched | |
| | | | library, clone: A030009B12, full insert | |
| | | | sequence | |
| 1215 | 3666.M16.gz43_521543 | AF158179 | Drosophila melanogaster strain Canton-S | 4.40E−07 |
| | | | Chiffon-2 (chiffon) mRNA, alternative | |
| | | | splice form 2, complete cds | |
| 1216 | 3666.N06.gz43_521384 | Z48796 | H. sapiens Ski-W mRNA for helicase | 1.70E−05 |
| 1217 | 3667.A15.gz43_524557 | AF005903 | Monodelphis domestica GTP-binding | 7.80E−08 |
| | | | protein homolog mRNA, partial cds | |
| 1218 | 3754.A08.gz43_532949 | AF091502 | Lactobacillus reuteri autoaggregation- | 1.00E−06 |
| | | | mediating protein (aggH) gene, complete | |
| | | | cds | |
| 1219 | 3754.A13.gz43_533029 | U02695 | Protomelas similis clone PsiI 32 SATA | 7.60E−07 |
| | | | satellite DNA sequence | |
| 1220 | 3754.A16.gz43_533077 | AE006577 | Streptococcus pyogenes M1 GAS strain | 9.00E−06 |
| | | | SF370, section 106 of 167 of the | |
| | | | complete genome | |
| 1221 | 3754.B04.gz43_532886 | S83995 | Pst1 fragment [Chlamydia pneumoniae, | 2.00E−06 |
| | | | Genomic, 474 nt] | |
| 1222 | 3754.B05.gz43_532902 | AY008833 | Staphylococcus aureus tcaR-tcaA-tcaB | 5.00E−06 |
| | | | operon, complete sequences | |
| 1223 | 3754.B07.gz43_532934 | AF270216 | Staphylococcus epidermidis strain SR1 | 9.50E−07 |
| | | | clone step.1054h11 genomic sequence | |
| 1224 | 3754.B08.gz43_532950 | AK007308 | Mus musculus adult male testis cDNA, | 7.00E−06 |
| | | | RIKEN full-length enriched library, | |
| | | | clone: 1700128E15, full insert sequence | |
| 1225 | 3754.B10.gz43_532982 | AE002807 | Drosophila melanogaster genomic | 5.40E−05 |
| | | | scaffold 142000013385251, complete | |
| | | | sequence | |
| 1226 | 3754.C22.gz43_533175 | D30612 | Homo sapiens mRNA for repressor | 4.00E−06 |
| | | | protein, partial cds | |
| 1227 | 3754.D19.gz43_533128 | L12043 | Plasmodium falciparum unidentified | 3.00E−06 |
| | | | mRNA sequence | |
| 1228 | 3754.E12.gz43_533017 | AB062933 | Macaca fascicularis brain cDNA | 3.60E−07 |
| | | | clone: QccE-22249, full insert sequence | |
| 1229 | 3754.E20.gz43_533145 | AL138746 | Human DNA sequence from clone RP3- | 8.30E−10 |
| | | | 389B13 on chromosome Xq26.2-27.1, | |
| | | | complete sequence [Homo sapiens] | |
| 1230 | 3754.F01.gz43_532842 | AF086820 | Drosophila melanogaster paired-like | 8.00E−06 |
| | | | homeodomain protein UNC-4 (unc-4) | |
| | | | mRNA, complete cds | |
| 1231 | 3754.F08.gz43_532954 | S66402 | vascular AT1a angiotensin receptor | 3.10E−05 |
| | | | {exon 1, promoter} [rats, Sprague- | |
| | | | Dawley, Genomic, 3477 nt] | |
| 1232 | 3754.F11.gz43_533002 | X57377 | Mouse dilute myosin heavy chain gene | 2.10E−05 |
| | | | for novel heavy chain with unique C- | |
| | | | terminal region | |
| 1233 | 3754.F15.gz43_533066 | AJ245620 | Homo sapiens CTL1 gene | 2.50E−12 |
| 1234 | 3754.F20.gz43_533146 | AE002426 | Neisseria meningitidis serogroup B strain | 3.70E−05 |
| | | | MC58 section 68 of 206 of the complete | |
| | | | genome | |
| 1235 | 3754.G03.gz43_532875 | AF002166 | Xenopus laevis Ig mu heavy chain | 1.20E−07 |
| | | | switch region sequence | |
| 1236 | 3754.G08.gz43_532955 | X71020 | N. tabacum Npg1 gene for | 6.80E−07 |
| | | | polygalacturonase | |
| 1237 | 3754.G18.gz43_533115 | AF126531 | Homo sapiens putative DNA-directed | 1.10E−13 |
| | | | RNA polymerase III C11 subunit gene, | |
| | | | complete cds | |
| 1238 | 3754.H08.gz43_532956 | L20127 | Rochalimaea henselae antigen (htrA) | 4.60E−07 |
| | | | gene, complete cds | |
| 1239 | 3754.I01.gz43_532845 | AK022138 | Homo sapiens cDNA FLJ12076 fis, | 3.90E−14 |
| | | | clone HEMBB1002442, weakly similar | |
| | | | to LIN-10 PROTEIN | |
| 1240 | 3754.I03.gz43_532877 | AF016653 | Caenorhabditis elegans cosmid C41D7, | 2.00E−06 |
| | | | complete sequence | |
| 1241 | 3754.J01.gz43_532846 | U97408 | Caenorhabditis elegans cosmid F48A9 | 4.00E−06 |
| 1242 | 3754.J05.gz43_532910 | Z35484 | Thermoanaerobacter sp. ATCC53627 | 4.00E−06 |
| | | | cgtA gene | |
| 1243 | 3754.J10.gz43_532990 | D17094 | Human HepG2 partial cDNA, clone | 5.10E−11 |
| | | | hmd5h04m5 | |
| 1244 | 3754.J12.gz43_533022 | Z56695 | H. sapiens CpG island DNA genomic | 1.00E−06 |
| | | | Mse1 fragment, clone 136d4, reverse | |
| | | | read cpg136d4.rt1a | |
| 1245 | 3754.J24.gz43_533214 | Y12855 | Homo sapiens P2X7 gene, exon 12 and | 2.50E−05 |
| | | | 13 | |
| 1246 | 3754.K14.gz43_533055 | L79913 | Xenopus laevis rds/peripherin (rds35) | 5.00E−06 |
| | | | mRNA, complete cds | |
| 1247 | 3754.K17.gz43_533103 | AE006251 | Lactococcus lactis subsp. lactis IL1403 | 9.00E−06 |
| | | | section 13 of 218 of the complete | |
| | | | genome | |
| 1248 | 3754.K20.gz43_533151 | AB047880 | Macaca fascicularis brain cDNA, | 1.00E−06 |
| | | | clone: QnpA-14303 | |
| 1249 | 3754.M08.gz43_532961 | X58467 | Human CYP2D7AP pseudogene for | 4.30E−11 |
| | | | cytochrome P450 2D6 | |
| 1250 | 3754.N16.gz43_533090 | U33116 | Saccharomyces cerevisiae high copy | 1.80E−07 |
| | | | DNA polymerase suppressor alpha | |
| | | | mutation gene (PSP2), complete cds | |
| 1251 | 3754.N19.gz43_533138 | AK025312 | Homo sapiens cDNA: FLJ21659 fis, | 1.40E−07 |
| | | | clone COL08743 | |
| 1252 | 3754.N22.gz43_533186 | AF081828 | Ixodes hexagonus mitochondrial DNA, | 4.00E−06 |
| | | | complete genome | |
| 1253 | 3754.O18.gz43_533123 | Z73229 | S. cerevisiae chromosome XII reading | 3.00E−06 |
| | | | frame ORF YLR057w | |
| 1254 | 3754.O23.gz43_533203 | AE006900 | Sulfolobus solfataricus section 259 of | 1.10E−05 |
| | | | 272 of the complete genome | |
| 1255 | 3754.P13.gz43_533044 | AF220217 | Homo sapiens rsec15-like protein | 1.80E−10 |
| | | | mRNA, partial cds | |
| 1256 | 3754.P17.gz43_533108 | AJ250862 | Bacillus sp. HIL-Y85/54728 mersacidin | 1.20E−05 |
| | | | biosynthesis gene cluster (mrsK2, | |
| | | | mrsR2, mrsF, mrsG, mrsE, mrsA, | |
| | | | mrsR1, mrsD, mrsM and mrsT genes) | |
| 1257 | 3756.A02.gz43_533237 | AF285594 | Homo sapiens testis protein TEX11 | 1.10E−05 |
| | | | (TEX11) mRNA, complete cds | |
| 1258 | 3756.A11.gz43_533381 | U43148 | Human patched homolog (PTC) mRNA, | 4.00E−06 |
| | | | complete cds | |
| 1259 | 3756.A13.gz43_533413 | U56861 | Nicotiana plumbaginifolia intergenic | 1.00E−06 |
| | | | region between lhcb1*1 and lhcb1*2 | |
| | | | genes | |
| 1260 | 3756.B03.gz43_533254 | AF101735 | Pan troglodytes isolate PTOR3A5P | 5.70E−08 |
| | | | olfactory receptor pseudogene, complete | |
| | | | sequence | |
| 1261 | 3756.B04.gz43_533270 | Z82038 | C. thermosaccharolyticum etfB, etfA, | 1.00E−06 |
| | | | hbd, thlA and actA genes | |
| 1262 | 3756.B15.gz43_533446 | M96151 | Mus musculus apolipoprotein B gene | 1.13E−04 |
| | | | sequence | |
| 1263 | 3756.B21.gz43_533542 | Z92793 | Caenorhabditis elegans cosmid H15M21, | 1.30E−05 |
| | | | complete sequence | |
| 1264 | 3756.B22.gz43_533558 | U43542 | Nicotiana tabacum diphenol oxidase | 2.00E−06 |
| | | | mRNA, complete cds | |
| 1265 | 3756.C06.gz43_533303 | AB022085 | Mus musculus Cctz-2 gene for | 7.00E−05 |
| | | | chaperonin containing TCP-1 zeta-2 | |
| | | | subunit, exon 5, 6, 7, 8, 9, 10 | |
| 1266 | 3756.C16.gz43_533463 | AF143236 | Homo sapiens apoptosis related protein | 5.00E−06 |
| | | | APR-2 mRNA, complete cds | |
| 1267 | 3756.D08.gz43_533336 | AB049544 | Porcine enterovirus 10 gene for RNA- | 7.20E−07 |
| | | | dependent RNA polymerase, partial cds | |
| 1268 | 3756.D18.gz43_533496 | X53658 | E. coli DNA fragment | 7.60E−08 |
| 1269 | 3756.D24.gz43_533592 | X96861 | H. virescens mRNA for pheromone | 2.40E−07 |
| | | | binding protein | |
| 1270 | 3756.E01.gz43_533225 | AF202892 | Mus musculus Kif21a (Kif21a) mRNA, | 4.00E−06 |
| | | | complete cds | |
| 1271 | 3756.E06.gz43_533305 | AF139374 | Homo sapiens DIR1 protein (DIR1) | 8.00E−06 |
| | | | gene, complete cds | |
| 1272 | 3756.E12.gz43_533401 | AF238884 | Botrytis virus F, complete genome | 8.00E−06 |
| 1273 | 3756.E22.gz43_533561 | U78866 | Arabidopsis thaliana putative arginine- | 5.00E−06 |
| | | | aspartate-rich RNA binding protein | |
| | | | (gene1500), (gene1000), and (gene400) | |
| | | | genes, complete cds | |
| 1274 | 3756.F11.gz43_533386 | D50091 | Drosophila ezoana G-3-P dehydrogenase | 2.00E−06 |
| | | | (alphaGpdh) gene, exon1-8, complete | |
| | | | cds | |
| 1275 | 3756.F16.gz43_533466 | AJ233973 | Gallus gallus microsatellite DNA | 4.20E−07 |
| | | | GCT028 (CA) repeat | |
| 1276 | 3756.G07.gz43_533323 | AE000708 | Aquifex aeolicus section 40 of 109 of the | 6.00E−05 |
| | | | complete genome | |
| 1277 | 3756.G12.gz43_533403 | M84731 | Pseudomonas sp. 5-substituted hydantoin | 1.20E−05 |
| | | | racemase (hyuE) gene, complete cds | |
| 1278 | 3756.G14.gz43_533435 | AL116458 | Botrytis cinerea strain T4 cDNA library | 6.70E−07 |
| | | | under conditions of nitrogen deprivation | |
| 1279 | 3756.I03.gz43_533261 | U67550 | Methanococcus jannaschii section 92 of | 2.30E−05 |
| | | | 150 of the complete genome | |
| 1280 | 3756.J05.gz43_533294 | U11292 | Human Ki nuclear autoantigen mRNA, | 7.70E−07 |
| | | | complete cds | |
| 1281 | 3756.K03.gz43_533263 | AF073484 | Homo sapiens MHC class I-related | 8.00E−06 |
| | | | protein MR1 precursor (MR1) gene, | |
| | | | signal peptide | |
| 1282 | 3756.K07.gz43_533327 | M37499 | Human methylmalonyl CoA mutase | 2.00E−06 |
| | | | (MUT) gene, exon 2 | |
| 1283 | 3756.K15.gz43_533455 | AF248820 | Maoricicada campbelli isolate TB-MC- | 7.30E−07 |
| | | | 016 tRNA-Asp gene, complete sequence; | |
| | | | ATPase subunit 8 gene, complete cds; | |
| | | | and ATPase subunit 6 gene, partial cds; | |
| | | | mitochondrial genes for mitochondrial | |
| | | | products | |
| 1284 | 3756.K18.gz43_533503 | M36300 | S. cerevisiae glutamine amidotransferase | 2.30E−05 |
| | | | (TRP3) gene, 3′ end | |
| 1285 | 3756.K20.gz43_533535 | AY022480 | Oryza sativa microsatellite MRG4805 | 2.00E−10 |
| | | | containing (AGG)X8, genomic sequence | |
| 1286 | 3756.L02.gz43_533248 | X03833 | Human gene for interleukin 1 alpha (IL-1 | 2.80E−12 |
| | | | alpha) | |
| 1287 | 3756.L03.gz43_533264 | AF244246 | Dysdera sp. MC cytochrome c oxidase I | 2.70E−07 |
| | | | (COI) gene, partial cds; mitochondrial | |
| | | | gene for mitochondrial product | |
| 1288 | 3756.L19.gz43_533520 | AJ002732 | Schizosaccharomyces pombe mRNA for | 2.00E−06 |
| | | | ribosomal protein 114 | |
| 1289 | 3756.M06.gz43_533313 | AK002951 | Mus musculus adult male brain cDNA, | 3.60E−07 |
| | | | RIKEN full-length enriched library, | |
| | | | clone: 0710001E20, full insert sequence | |
| 1290 | 3756.M07.gz43_533329 | AF057708 | Populus balsamifera subsp. trichocarpa | 2.60E−07 |
| | | | PTD protein (PTD) gene, complete cds | |
| 1291 | 3756.M20.gz43_533537 | Z35821 | S. cerevisiae chromosome II reading | 2.00E−06 |
| | | | frame ORF YBL060w | |
| 1292 | 3756.N18.gz43_533506 | AL591667 | Human DNA sequence from clone | 6.10E−05 |
| | | | RP11-389N9 on chromosome 6, | |
| | | | complete sequence [Homo sapiens] | |
| 1293 | 3756.N21.gz43_533554 | AK026258 | Homo sapiens cDNA: FLJ22605 fis, | 2.00E−06 |
| | | | clone HSI04743 | |
| 1294 | 3756.O03.gz43_533267 | U61347 | Leiophyllum buxifolium ribosomal | 4.20E−07 |
| | | | maturase (matK) gene, chloroplast gene | |
| | | | encoding chloroplast protein, complete | |
| | | | cds | |
| 1295 | 3756.O07.gz43_533331 | AF177871 | Drosophila melanogaster small GTPase | 5.70E−07 |
| | | | RHO1 (Rho1) gene, alternatively spliced | |
| | | | products and complete cds | |
| 1296 | 3756.O08.gz43_533347 | M60705 | Homo sapiens type I DNA | 6.00E−06 |
| | | | topoisomerase gene, exons 19 and 20 | |
| 1297 | 3756.P08.gz43_533348 | M60705 | Homo sapiens type I DNA | 1.00E−05 |
| | | | topoisomerase gene, exons 19 and 20 | |
| 1298 | 3759.C01.gz43_533607 | X71874 | H. sapiens genes for proteasome-like | 4.00E−06 |
| | | | subunit (MECL-1), chymotrypsin-like | |
| | | | protease (CTRL-1) and protein serine | |
| | | | kinase (PSK-H1) last exon | |
| 1299 | 3759.D15.gz43_533832 | AL356790 | Human DNA sequence from clone | 1.10E−07 |
| | | | RP11-238J15 on chromosome 20 | |
| | | | Contains ESTs and GSSs. Contains part | |
| | | | of the TOM gene for a putative | |
| | | | mitochondrial outer membrane protein | |
| | | | import receptor similar to yeast pre- | |
| | | | mRNA splicing factors Prp1/Zer1 and | |
| | | | Prp6, complete> | |
| 1300 | 3759.H08.gz43_533724 | M31684 | D. melanogaster cytoskeleton-like | 2.00E−06 |
| | | | bicaudalD protein (BicD) mRNA, | |
| | | | complete cds | |
| 1301 | 3759.H15.gz43_533836 | AB046001 | Macaca fascicularis brain cDNA, | 2.60E−07 |
| | | | clone: QccE-12738 | |
| 1302 | 3759.H17.gz43_533868 | AE000706 | Aquifex aeolicus section 38 of 109 of the | 1.30E−05 |
| | | | complete genome | |
| 1303 | 3759.H23.gz43_533964 | AK027088 | Homo sapiens cDNA: FLJ23435 fis, | 6.20E−34 |
| | | | clone HRC12631 | |
| 1304 | 3759.I05.gz43_533677 | AF056433 | Homo sapiens clone FBD3 Cri-du-chat | 1.70E−07 |
| | | | critical region mRNA | |
| 1305 | 3759.I19.gz43_533901 | Z69666 | Human DNA sequence from cosmid | 2.06E−04 |
| | | | 24F8 from a contig from the tip of the | |
| | | | short arm of chromosome 16, spanning | |
| | | | 2 Mb of 16p13.3. Contains ESTs, repeat | |
| | | | polymorphism and CpG island | |
| 1306 | 3759.K05.gz43_533679 | L01432 | Soybean calmodulin (SCaM-3) mRNA, | 4.10E−08 |
| | | | complete cds | |
| 1307 | 3759.K17.gz43_533871 | Z33340 | M. capricolum DNA for CONTIG | 4.00E−06 |
| | | | MC456 | |
| 1308 | 3759.L02.gz43_533632 | U26736 | Caenorhabditis elegans stomatin-like | 3.70E−05 |
| | | | protein MEC-2 (mec-2) gene, complete | |
| | | | cds | |
| 1309 | 3759.L09.gz43_533744 | M11180 | Transposon Tn917 (complete), | 1.50E−07 |
| | | | macrolide-lincosamide-streptogramin-B | |
| | | | (MLS) resistance, complete cds | |
| 1310 | 3759.L10.gz43_533760 | AF117022 | Solaria atropurpurea trnL gene, partial | 4.40E−07 |
| | | | sequence; chloroplast gene for | |
| | | | chloroplast product | |
| 1311 | 3759.L15.gz43_533840 | U22657 | Mus musculus genomic locus related to | 1.60E−05 |
| | | | cellular morphology | |
| 1312 | 3759.L24.gz43_533984 | AK022990 | Homo sapiens cDNA FLJ12928 fis, | 7.60E−10 |
| | | | clone NT2RP2004767 | |
| 1313 | 3759.M19.gz43_533905 | M96324 | Lycopersicon esculentum Ca2+-ATPase | 2.50E−05 |
| | | | gene, complete cds | |
| 1314 | 3759.N08.gz43_533730 | AK005546 | Mus musculus adult female placenta | 1.30E−07 |
| | | | cDNA, RIKEN full-length enriched | |
| | | | library, clone: 1600027G01, full insert | |
| | | | sequence | |
| 1315 | 3759.N16.gz43_533858 | AB014079 | Homo sapiens genomic DNA, | 3.80E−12 |
| | | | chromosome 6p21.3, HLA class I region, | |
| | | | Cosmid clone: TY1E11, complete | |
| | | | sequence | |
| 1316 | 3759.N23.gz43_533970 | AK018377 | Mus musculus 16 days embryo lung | 5.70E−07 |
| | | | cDNA, RIKEN full-length enriched | |
| | | | library, clone: 8430403M08, full insert | |
| | | | sequence | |
| 1317 | 3759.O16.gz43_533859 | AE000918 | Methanobacterium thermoautotrophicum | 1.40E−05 |
| | | | from bases 1444576 to 1460617 (section | |
| | | | 124 of 148) of the complete genome | |
| 1318 | 3759.P03.gz43_533652 | L06066 | Saccharomyces cerevisiae PET117 | 5.90E−07 |
| | | | polypeptide (PET117) gene, complete | |
| | | | cds | |
| 1319 | 3759.P13.gz43_533812 | X89414 | A. thaliana DNA for pyrroline-5- | 5.00E−06 |
| | | | carboxylase synthetase gene | |
| 1320 | 3759.P15.gz43_533844 | X66979 | X. laevis mRNA XLFLI | 1.50E−05 |
| 1321 | 3759.P17.gz43_533876 | AF039313 | Moraxella catarrhalis strain LES-1 | 2.00E−06 |
| | | | transferrin binding protein B (tbpB) | |
| | | | gene, complete cds | |
| 1322 | 3762.A09.gz43_534117 | AE000496 | Escherichia coli K12 MG1655 section | 1.63E−04 |
| | | | 386 of 400 of the complete genome | |
| 1323 | 3762.A16.gz43_534229 | X98371 | D. subobscura sex-lethal gene | 7.00E−06 |
| 1324 | 3762.A19.gz43_534277 | U95019 | Human voltage-dependent calcium | 6.10E−07 |
| | | | channel beta-2c subunit mRNA, | |
| | | | complete cds | |
| 1325 | 3762.A20.gz43_534293 | M10014 | Homo sapiens map 4q28 fibrinogen | 8.00E−06 |
| | | | (FGG) gene, alternative splice products, | |
| | | | complete cds | |
| 1326 | 3762.B05.gz43_534054 | J05614 | Human proliferating cell nuclear antigen | 1.40E−05 |
| | | | (PCNA) gene, promoter region | |
| 1327 | 3762.B15.gz43_534214 | AJ297559 | Homo sapiens partial PIK3CB gene for | 2.50E−05 |
| | | | phosphatidylinositol 3-kinase catalytic | |
| | | | subunit p110beta, exons 15-17 | |
| 1328 | 3762.C20.gz43_534295 | M58580 | Rabbit angiotensin-converting enzyme | 3.10E−05 |
| | | | (ACE) gene, 5′ end | |
| 1329 | 3762.C23.gz43_534343 | L27146 | Human neurofibromatosis 2 (NF2) gene, | 1.00E−06 |
| | | | exon 16 | |
| 1330 | 3762.D03.gz43_534024 | U51305 | Triticum aestivum alpha-gliadin storage | 1.40E−05 |
| | | | protein pseudogene, complete cds | |
| 1331 | 3762.D04.gz43_534040 | AF263274 | Chionodraco rastrospinosus isolate Cra7 | 3.50E−07 |
| | | | alpha tubulin mRNA, complete cds | |
| 1332 | 3762.D18.gz43_534264 | M94764 | Glycine max cv. Dare nodulin 26 gene | 2.50E−05 |
| | | | fragment | |
| 1333 | 3762.D19.gz43_534280 | AE001446 | Helicobacter pylori, strain J99 section 7 | 3.30E−05 |
| | | | of 132 of the complete genome | |
| 1334 | 3762.D22.gz43_534328 | M73962 | Bovine pregnancy-associated | 4.00E−06 |
| | | | glycoprotein 1 mRNA, complete cds | |
| 1335 | 3762.E01.gz43_533993 | X63746 | S. cerevisiae rpc34 and fun34 genes for | 4.00E−06 |
| | | | DNA dependant RNA polymerase c (III) | |
| 1336 | 3762.E10.gz43_534137 | Z74847 | S. cerevisiae chromosome XV reading | 1.00E−05 |
| | | | frame ORF YOL105c | |
| 1337 | 3762.E15.gz43_534217 | AF207841 | Pyricularia grisea AVR-Pita (AVR-Pita) | 2.20E−09 |
| | | | gene, complete cds | |
| 1338 | 3762.E23.gz43_534345 | M58600 | Human heparin cofactor II (HCF2) gene, | 3.60E−37 |
| | | | exons 1 through 5 | |
| 1339 | 3762.F08.gz43_534106 | Z47066 | Human cosmid Qc14G3 from Xq28 | 3.10E−09 |
| | | | contains STSs | |
| 1340 | 3762.F22.gz43_534330 | AY034974 | Arabidopsis thaliana unknown protein | 4.20E−07 |
| | | | (F24J8.3) mRNA, complete cds | |
| 1341 | 3762.G18.gz43_534267 | Z28150 | S. cerevisiae chromosome XI reading | 2.00E−06 |
| | | | frame ORF YKL150w | |
| 1342 | 3762.H12.gz43_534172 | AF370230 | Arabidopsis thaliana unknown protein | 6.60E−08 |
| | | | (T21P5_16/AT3g03420) mRNA, | |
| | | | complete cds | |
| 1343 | 3762.I07.gz43_534093 | U19569 | Human squamous cell carcinoma antigen | 4.60E−07 |
| | | | (SCCA2) gene, exon 1 | |
| 1344 | 3762.J03.gz43_534030 | U22421 | Mus musculus obesity protein (ob) gene, | 5.30E−07 |
| | | | complete cds | |
| 1345 | 3762.J18.gz43_534270 | AB027966 | Schizosaccharomyces pombe gene for | 2.30E−08 |
| | | | Hypothetical protein, partial cds, | |
| | | | clone: TB89 | |
| 1346 | 3762.K02.gz43_534015 | AF273762 | Homo sapiens 3-hydroxy-3- | 4.40E−14 |
| | | | methylglutaryl-coenzyme reductase | |
| | | | gene, exon 15 | |
| 1347 | 3762.K20.gz43_534303 | K01464 | Rat cardiac alpha-myosin heavy chain | 3.00E−06 |
| | | | gene, 5′ flank, 1st 3 exons | |
| 1348 | 3762.L18.gz43_534272 | Z49438 | S. cerevisiae chromosome X reading | 4.00E−06 |
| | | | frame ORF YJL163c | |
| 1349 | 3762.L20.gz43_534304 | XM_030040 | Homo sapiens similar to KIAA0877 | 3.00E−06 |
| | | | protein (H. sapiens) (LOC90219), | |
| | | | mRNA | |
| 1350 | 3762.M04.gz43_534049 | AF002237 | Anopheles gambiae clone 227 mRNA | 4.00E−06 |
| | | | sequence | |
| 1351 | 3762.M17.gz43_534257 | M29688 | S. cerevisiae PMS1 gene encoding DNA | 1.40E−08 |
| | | | mismatch repair protein, complete cds | |
| 1352 | 3762.M23.gz43_534353 | M20006 | Chicken tumor 10 c-myc DNA, exons 2 | 2.90E−09 |
| | | | and 3 | |
| 1353 | Clu1014734.con_1 | AB027966 | Schizosaccharomyces pombe gene for | 3.00E−08 |
| | | | Hypothetical protein, partial cds, | |
| | | | clone: TB89 | |
| 1354 | Clu1036845.con_1 | M34429 | Human PVT-IGLC fusion protein | 1.37E−03 |
| | | | mRNA, 5′ end | |

### Example 21

### Members of Protein Families

[0405] SEQ ID NOS:134-1352 were used to conduct a profile search as described in the specification above. Several of the polynucleotides of the invention were found to encode polypeptides having characteristics of a polypeptide belonging to a known protein family (and thus represent members of these protein families) and/or comprising a known functional domain. Table 18 (inserted prior to claims) provides: 1) the SEQ ID NO (“SEQ ID”) of the query polynucleotide sequence; 2) the sequence name (“SEQ NAME”) used as an internal identifier of the query-sequence; 3) the name (“PFAM NAME”) of the profile hit; 4) a brief description of the profile hit (“PFAM DESCRIPTION”); 5) the score (“SCORE”) of the profile hit; 6) the starting nucleotide of the profile hit (“START”); and 7) the ending nucleotide of the profile hit (“END”).

TABLE 18

| SEQ | | | | | | |
|---|---|---|---|---|---|---|
| ID | SEQ NAME | PFAM NAME | PFAM DESCRIPTION | SCORE | START | END |
| 222 | 3547.D19.GZ43_505986 | DC1 | DC1 domain | 30.64 | 411 | 493 |
| 270 | 3550.G02.GZ43_506101 | rvt | Reverse transcriptase (RNA- | 47.32 | 321 | 611 |
| | | | dependent DNA polymerase) | | | |
| 454 | 3562.B22.GZ43_507952 | 7tm_1 | 7 transmembrane receptor | 37.16 | 154 | 479 |
| | | | (rhodopsin family) | | | |
| 454 | 3562.B22.GZ43_507952 | Bowman- | Bowman-Birk serine | 45.92 | 292 | 450 |
| | | Birk_leg | protease inhibitor family | | | |
| 454 | 3562.B22.GZ43_507952 | Cation_efflux | Cation efflux family | 33.32 | 225 | 380 |
| 491 | 3565.E16.GZ43_508243 | AP_endonucleas1 | AP endonuclease family 1 | 38.16 | 406 | 577 |
| 546 | 3571.A08.GZ43_508897 | oxidored_q1 | NADH- | 30.04 | 297 | 393 |
| | | | Ubiquinone/plastoquinone | | | |
| | | | (complex I), various chains | | | |
| 550 | 3571.B13.GZ43_508978 | EGF | EGF-like domain | 38.88 | 243 | 355 |
| 551 | 3571.B22.GZ43_509122 | EGF | EGF-like domain | 38.88 | 243 | 355 |
| 564 | 3571.H10.GZ43_508936 | WW | WW domain | 54.92 | 487 | 576 |
| 724 | 3583.H13.GZ43_510520 | Sre | C. elegans Sre G protein- | 30.36 | 282 | 485 |
| | | | coupled chemoreceptor | | | |
| 771 | 3590.J21.GZ43_512427 | bZIP | bZIP transcription factor | 33.68 | 166 | 308 |
| 778 | 3590.M03.GZ43_512142 | protamine_P1 | Protamine P1 | 35.88 | 268 | 437 |
| 907 | 3608.L14.gz43_514237 | Transposase_22 | L1 transposable element | 62.12 | 491 | 616 |
| 969 | 3617.P12.gz43_515361 | AP_endonucleas1 | AP endonuclease family 1 | 39.84 | 63 | 254 |
| 1038 | 3632.O06.gz43_517407 | 60s_ribosomal | 60s Acidic ribosomal protein | 38.04 | 276 | 444 |
| 1038 | 3632.O06.gz43_517407 | 60s_ribosomal | 60s Acidic ribosomal protein | 36.44 | 13 | 98 |
| 1128 | 3662.H23.gz43_520114 | Glycoprotein_G | Pneumovirus attachment | 43.04 | 21 | 297 |
| | | | glycoprotein G | | | |
| 1128 | 3662.H23.gz43_520114 | Metallothio_5 | Metallothionein family 5 | 47.88 | 231 | 345 |
| 1128 | 3662.H23.gz43_520114 | squash | Squash family serine | 34.6 | 222 | 301 |
| | | | protease inhibitor | | | |
| 1128 | 3662.H23.gz43_520114 | Syndecan | Syndecan domain | 35.36 | 1 | 308 |
| 1145 | 3663.G01.gz43_520145 | KRAB | KRAB box | 95.08 | 424 | 484 |
| 1350 | 3762.M04.gz43_534049 | protamine_P1 | Protamine P1 | 33.16 | 293 | 468 |

[0406] In addition, SEQ ID NOS:1619-1675 were also used to conduct a profile search as described above. Several of the polypeptides of the invention were found to have characteristics of a polypeptide belonging to a known protein family (and thus represent members of these protein families) and/or comprising a known functional domain. Table 19 (inserted prior to claims) provides: 1) the SEQ ID NO (“SEQ ID”) of the query protein sequence; 2) the sequence name (“PROTEIN SEQ NAME”) used as an internal identifier of the query sequence; 3) the name (“PFAM NAME”) of the profile hit; 4) a brief description of the profile hit (“PFAM DESCRIPTION”); 5) the score (“SCORE”) of the profile hit; 6) the starting residue of the profile hit (“START”); and 7) the ending residue of the profile hit (“END”).

TABLE 19

| SEQ | | PFAM | PFAM | | | |
|---|---|---|---|---|---|---|
| ID | SEQ NAME | NAME | DESCRIPTION | SCORE | START | END |
| 1619 | NTP_004511S11.3_4 | Armadillo_seg | Armadillo/beta- | 1.8E−95 | 142 | 184 |
| | | | catenin-like repeat | | | |
| 1619 | NTP_004511S11.3_4 | Armadillo_seg | Armadillo/beta- | 1.8E−95 | 186 | 226 |
| | | | catenin-like repeat | | | |
| 1619 | NTP_004511S11.3_4 | Armadillo_seg | Armadillo/beta- | 1.8E−95 | 228 | 269 |
| | | | catenin-like repeat | | | |
| 1619 | NTP_004511S11.3_4 | Armadillo_seg | Armadillo/beta- | 1.8E−95 | 271 | 311 |
| | | | catenin-like repeat | | | |
| 1619 | NTP_004511S11.3_4 | Armadillo_seg | Armadillo/beta- | 1.8E−95 | 313 | 353 |
| | | | catenin-like repeat | | | |
| 1619 | NTP_004511S11.3_4 | Armadillo_seg | Armadillo/beta- | 1.8E−95 | 355 | 395 |
| | | | catenin-like repeat | | | |
| 1619 | NTP_004511S11.3_4 | Armadillo_seg | Armadillo/beta- | 1.8E−95 | 397 | 437 |
| | | | catenin-like repeat | | | |
| 1619 | NTP_004511S11.3_4 | Armadillo_seg | Armadillo/beta- | 1.8E−95 | 440 | 480 |
| | | | catenin-like repeat | | | |
| 1619 | NTP_004511S11.3_4 | Armadillo_seg | Armadillo/beta- | 1.8E−95 | 142 | 184 |
| | | | catenin-like repeat | | | |
| 1619 | NTP_004511S11.3_4 | Armadillo_seg | Armadillo/beta- | 1.8E−95 | 186 | 226 |
| | | | catenin-like repeat | | | |
| 1619 | NTP_004511S11.3_4 | Armadillo_seg | Armadillo/beta- | 1.8E−95 | 228 | 269 |
| | | | catenin-like repeat | | | |
| 1619 | NTP_004511S11.3_4 | Armadillo_seg | Armadillo/beta- | 1.8E−95 | 271 | 311 |
| | | | catenin-like repeat | | | |
| 1619 | NTP_004511S11.3_4 | Armadillo_seg | Armadillo/beta- | 1.8E−95 | 313 | 353 |
| | | | catenin-like repeat | | | |
| 1619 | NTP_004511S11.3_4 | Armadillo_seg | Armadillo/beta- | 1.8E−95 | 355 | 395 |
| | | | catenin-like repeat | | | |
| 1619 | NTP_004511S11.3_4 | Armadillo_seg | Armadillo/beta- | 1.8E−95 | 397 | 437 |
| | | | catenin-like repeat | | | |
| 1619 | NTP_004511S11.3_4 | Armadillo_seg | Armadillo/beta- | 1.8E−95 | 440 | 480 |
| | | | catenin-like repeat | | | |
| 1619 | NTP_004511S11.3_4 | IBB | Importin beta binding | 5.8E−37 | 35 | 124 |
| | | | domain | | | |
| 1619 | NTP_004511S11.3_4 | IBB | Importin beta binding | 5.8E−37 | 35 | 124 |
| | | | domain | | | |
| 1630 | NTP_007592S2.3_10 | histone | Core histone | 1.2E−10 | 2 | 97 |
| | | | H2A/H2B/H3/H4 | | | |
| 1630 | NTP_007592S2.3_10 | histone | Core histone | 1.2E−10 | 2 | 97 |
| | | | H2A/H2B/H3/H4 | | | |
| 1633 | NTP_007867S7.3_3 | GTF2I | GTF2I-like repeat | 7.2E−76 | 106 | 171 |
| 1633 | NTP_007867S7.3_3 | GTF2I | GTF2I-like repeat | 7.2E−76 | 295 | 370 |
| 1633 | NTP_007867S7.3_3 | GTF2I | GTF2I-like repeat | 7.2E−76 | 106 | 171 |
| 1633 | NTP_007867S7.3_3 | GTF2I | GTF2I-like repeat | 7.2E−76 | 295 | 370 |
| 1634 | NTP_007867S8.3_1 | GTF2I | GTF2I-like repeat | 7.2E−76 | 122 | 187 |
| 1634 | NTP_007867S8.3_1 | GTF2I | GTF2I-like repeat | 7.2E−76 | 311 | 386 |
| 1634 | NTP_007867S8.3_1 | GTF2I | GTF2I-like repeat | 7.2E−76 | 122 | 187 |
| 1634 | NTP_007867S8.3_1 | GTF2I | GTF2I-like repeat | 7.2E−76 | 311 | 386 |
| 1640 | NTP_008858S2.3_2 | GST_N | Glutathione S- | 4.6E−11 | 21 | 95 |
| | | | transferase, N-terminal | | | |
| | | | domain | | | |
| 1640 | NTP_008858S2.3_2 | GST_N | Glutathione S- | 4.6E−11 | 21 | 95 |
| | | | transferase, N-terminal | | | |
| | | | domain | | | |
| 1643 | NTP_009526S2.3_3 | CBS | CBS domain | 4.8E−43 | 30 | 84 |
| 1643 | NTP_009526S2.3_3 | CBS | CBS domain | 4.8E−43 | 111 | 165 |
| 1643 | NTP_009526S2.3_3 | CBS | CBS domain | 4.8E−43 | 186 | 239 |
| 1643 | NTP_009526S2.3_3 | CBS | CBS domain | 4.8E−43 | 258 | 311 |
| 1643 | NTP_009526S2.3_3 | CBS | CBS domain | 4.8E−43 | 30 | 84 |
| 1643 | NTP_009526S2.3_3 | CBS | CBS domain | 4.8E−43 | 111 | 165 |
| 1643 | NTP_009526S2.3_3 | CBS | CBS domain | 4.8E−43 | 186 | 239 |
| 1643 | NTP_009526S2.3_3 | CBS | CBS domain | 4.8E−43 | 258 | 311 |
| 1644 | NTP_009526S2.3_5 | CBS | CBS domain | 4.8E−43 | 30 | 84 |
| 1644 | NTP_009526S2.3_5 | CBS | CBS domain | 4.8E−43 | 111 | 165 |
| 1644 | NTP_009526S2.3_5 | CBS | CBS domain | 4.8E−43 | 186 | 239 |
| 1644 | NTP_009526S2.3_5 | CBS | CBS domain | 4.8E−43 | 258 | 311 |
| 1644 | NTP_009526S2.3_5 | CBS | CBS domain | 4.8E−43 | 30 | 84 |
| 1644 | NTP_009526S2.3_5 | CBS | CBS domain | 4.8E−43 | 111 | 165 |
| 1644 | NTP_009526S2.3_5 | CBS | CBS domain | 4.8E−43 | 186 | 239 |
| 1644 | NTP_009526S2.3_5 | CBS | CBS domain | 4.8E−43 | 258 | 311 |
| 1647 | NTP_010018S2.3_5 | DAG_PE-bind | Phorbol | 7.7E−23 | 154 | 203 |
| | | | esters/diacylglycerol | | | |
| | | | binding domain (C1 | | | |
| | | | domain) | | | |
| 1647 | NTP_010018S2.3_5 | DAG_PE-bind | Phorbol | 7.7E−23 | 387 | 426 |
| | | | esters/diacylglycerol | | | |
| | | | binding domain (C1 | | | |
| | | | domain) | | | |
| 1647 | NTP_010018S2.3_5 | DAG_PE-bind | Phorbol | 7.7E−23 | 154 | 203 |
| | | | esters/diacylglycerol | | | |
| | | | binding domain (C1 | | | |
| | | | domain) | | | |
| 1647 | NTP_010018S2.3_5 | DAG_PE-bind | Phorbol | 7.7E−23 | 387 | 426 |
| | | | esters/diacylglycerol | | | |
| | | | binding domain (C1 | | | |
| | | | domain) | | | |
| 1651 | NTP_010757S4.3_2 | T-box | T-box | 6E−114 | 935 | 1099 |
| 1651 | NTP_010757S4.3_2 | T-box | T-box | 6E−114 | 1142 | 1160 |
| 1651 | NTP_010757S4.3_2 | T-box | T-box | 6E−114 | 935 | 1099 |
| 1651 | NTP_010757S4.3_2 | T-box | T-box | 6E−114 | 1142 | 1160 |
| 1653 | NTP_011130S2.3_3 | GATA | GATA zinc finger | 1.5E−11 | 159 | 198 |
| 1653 | NTP_011130S2.3_3 | GATA | GATA zinc finger | 1.5E−11 | 159 | 198 |
| 1656 | NTP_011430S6.3_6 | cadherin | Cadherin domain | 7.4E−61 | 174 | 270 |
| 1656 | NTP_011430S6.3_6 | cadherin | Cadherin domain | 7.4E−61 | 284 | 390 |
| 1656 | NTP_011430S6.3_6 | cadherin | Cadherin domain | 7.4E−61 | 405 | 495 |
| 1656 | NTP_011430S6.3_6 | cadherin | Cadherin domain | 7.4E−61 | 174 | 270 |
| 1656 | NTP_011430S6.3_6 | cadherin | Cadherin domain | 7.4E−61 | 284 | 390 |
| 1656 | NTP_011430S6.3_6 | cadherin | Cadherin domain | 7.4E−61 | 405 | 495 |
| 1658 | NTP_017582S2.3_6 | HMG_box | HMG (high mobility | 6.8E−09 | 34 | 92 |
| | | | group) box | | | |
| 1658 | NTP_017582S2.3_6 | HMG_box | HMG (high mobility | 6.8E−09 | 34 | 92 |
| | | | group) box | | | |
| 1675 | NTP_026331S1.1_1 | GTF2I | GTF2I-like repeat | 7.2E−76 | 106 | 171 |
| 1675 | NTP_026331S1.1_1 | GTF2I | GTF2I-like repeat | 7.2E−76 | 295 | 370 |
| 1675 | NTP_026331S1.1_1 | GTF2I | GTF2I-like repeat | 7.2E−76 | 106 | 171 |
| 1675 | NTP_026331S1.1_1 | GTF2I | GTF2I-like repeat | 7.2E−76 | 295 | 370 |

[0407] Some SEQ ID NOS exhibited multiple profile hits where the query sequence contains overlapping profile regions, and/or where the sequence contains two different functional domains. Each of the profile hits of Tables 18 and 19 is described in more detail below. The acronyms for the profiles (provided in parentheses) are those used to identify the profile in the Pfam, Prosite, and InterPro databases. The Pfam database can be accessed through web sites supported by Genome Sequencing Center at the Washington University School of Medicine or by the European Molecular Biology Laboratories in Heidelberg, Germany. The Prosite database can be accessed at the ExPASy Molecular Biology Server on the internet. The InterPro database can be accessed at a web site supported by the EMBL European Bioinformatics Institute. The public information available on the Pfam, Prosite, and InterPro databases regarding the various profiles, including but not limited to the activities, function, and consensus sequences of various proteins families and protein domains, is incorporated herein by reference.

[0408] Epidermal Growth Factor (EGF; Pfam Accession No. PF00008). SEQ ID NOS:550 and 551 represent polynucleotides encoding a member of the EGF family of proteins. The distinguishing characteristic of this family is the presence of a sequence of about thirty to forty amino acid residues found in epidermal growth factor (EGF) which has been shown to be present, in a more or less conserved form, in a large number of other proteins (Davis, New Biol. (1990) 2:410-419; Blomquist et al., Proc. Natl. Acad. Sci. U.S.A. (1984) 81:7363-7367; Barkert et al., Protein Nucl. Acid Enz. (1986) 29:54-86; Doolittle et al., Nature. (1984) 307:558-560; Appella et al., FEBS Lett. (1988) 231:1-4; Campbell and Bork, Curr. Opin. Struct. Biol. (1993) 3:385-392). A common feature of the domain is that the conserved pattern is generally found in the extracellular domain of membrane-bound proteins or in proteins known to be secreted. The EGF domain includes six cysteine residues which have been shown to be involved in disulfide bonds. The main structure is a two-stranded beta-sheet followed by a loop to a C-terminal short two-stranded sheet. Subdomains between the conserved cysteines strongly vary in length. These consensus patterns are used to identify members of this family: C-x-C-x(5)-G-x(2)-C and C-x-C-x(s)-[GP]-[FYW]-x(4,8)-C.

[0409] Seven Transmembrane Integral Membrane Proteins—Rhodopsin Family (7tm_{—}1; Pfam Accession No. PF00001). SEQ ID NO:454 corresponds to a sequence encoding a polypeptide that is a member of the seven transmembrane (7tm) receptor rhodopsin family. G-protein coupled receptors of the (7tm) rhodopsin family (also called R7G) are an extensive group of hormones, neurotransmitters, and light receptors which transduce extracellular signals by interaction with guanine nucleotide-binding (G) proteins (Strosberg, Eur. J. Biochem. (1991) 196:1; Kerlavage, Curr. Opin. Struct. Biol. (1991) 1:394; Probst et al., DNA Cell Biol. (1992) 11:1; Savarese et al., Biochem. J. (1992) 283:1. The consensus pattern that contains the conserved triplet and that also spans the major part of the third transmembrane helix is used to detect this widespread family of proteins: [GSTALIVMFYWC]-[GSTANCPDE]-{EDPKRH}-x(2)-[LIVMNQGA]-x(2)-[LIVMFT]-[GSTANC]-[LIVMFYWSTAC]-[DENH]-R-[FYWCSH]-x(2)-[LIVM].

[0410] Basic Region Plus Leucine Zipper Transcription Factors (bZIP; Pfam Accession No. PF00170). SEQ ID NO:771 represents a polynucleotide encoding a novel member of the family of basic region plus leucine zipper transcription factors. The bZIP superfamily (Hurst, Protein Prof. (1995) 2:105; and Ellenberger, Curr. Opin. Struct. Biol. (1994) 4:12) of eukaryotic DNA-binding transcription factors encompasses proteins that contain a basic region mediating sequence-specific DNA-binding followed by a leucine zipper required for dimerization. The consensus pattern for this protein family is: [KR]-x(1,3)-[RKSAQ]-N-x(2)-[SAQ](2)-x-[RKTAENQ]-x-R-x-[RK].

[0411] Reverse Transcriptase (rvt; Pfam Accession No. PF00078). SEQ ID NO:270 represents a polynucleotide encoding a reverse transcriptase, which occurs in a variety of mobile elements, including retrotransposons, retroviruses, group II introns, bacterial msDNAs, hepadnaviruses, and caulimoviruses (Xiong and Eickbush, EMBO J. (1990) 9:3353-3362). Reverse transcriptases catalyze RNA-template-directed extension of the 3′-end of a DNA strand by one deoxynucleotide at a time and require an RNA or DNA primer.

[0412] KRAB box (KRAB; Pfam Accession No. PF01352). SEQ ID NO:1145 represents a polypeptide having a Krueppel-associated box (KRAB). A KRAB box is a domain of around 75 amino acids that is found in the N-terminal part of about one third of eukaryotic Krueppel-type C₂H₂ zinc finger proteins (ZFPs). It is enriched in charged amino acids and can be divided into subregions A and B, which are predicted to fold into two amphipathic alpha-helices. The KRAB A and B boxes can be separated by variable spacer segments and many KRAB proteins contain only the A box.

[0413] The KRAB domain functions as a transcriptional repressor when tethered to the template DNA by a DNA-binding domain. A sequence of 45 amino acids in the KRAB A subdomain has been shown to be necessary and sufficient for transcriptional repression. The B box does not repress by itself but does potentiate the repression exerted by the KRAB A subdomain. Gene silencing requires the binding of the KRAB domain to the RING-B box-coiled coil (RBCC) domain of the KAP-1/TIF1-beta corepressor. As KAP-1 binds to the heterochromatin proteins HP1, it has been proposed that the KRAB-ZFP-bound target gene could be silenced following recruitment to heterochromatin.

[0414] KRAB-ZFPs constitute one of the single largest class of transcription factors within the human genome, and appear to play important roles during cell differentiation and development. The KRAB domain is generally encoded by two exons. The regions coded by the two exons are known as KRAB-A and KRAB-B.

[0415] Armadillo/beta-catenin-like repeat (Armadillo_seg: Pfam Accession No. PF00514). SEQ ID NO: 1619 represents a polypeptide having sequence similarity with the armadillo/beta-catenin-like repeat (armadillo). The armadillo repeat is an approximately 40 amino acid long tandemly repeated sequence motif first identified in the Drosophila segment polarity gene armadillo. Similar repeats were later found in the mammalian armadillo homolog beta-catenin, the junctional plaque protein plakoglobin, the adenomatous polyposis coli (APC) tumor suppressor protein, and a number of other proteins (Peifer et al., Cell 76(2):786-791 (1994)).

[0416] The 3 dimensional fold of an armadillo repeat is known from the crystal structure of beta-catenin (Rojas et al., Cell 95:105-130 (1998)). There, the 12 repeats form a superhelix of alpha-helices, with three helices per unit. The cylindrical structure features a positively charged grove which presumably interacts with the acidic surfaces of the known interaction partners of beta-catenin.

[0417] Cadherin domain (cadherin; Pfam Accession No. PF00028). SEQ ID NO: 1656 represents a polypeptide having sequence similarity to a cadherin domain. Cadherins are a family of animal glycoproteins responsible for calcium-dependent cell-cell adhesion (Takeichi, Annu. Rev. Biochem. 59:237-252(1990); Takeichi, Trends Genet. 3:213-217(1987)). Cadherins preferentially interact with themselves in a homophilic manner in connecting cells; thus acting as both receptor and ligand. A wide number of tissue-specific forms of cadherins are known, for example: Epithelial (E-cadherin) (CDH1); Neural (N-cadherin) (CDH2); Placental (P-cadherin) (CDH3); Retinal (R-cadherin) (CDH4); Vascular endothelial (VE-cadherin) (CDH5); Kidney (K-cadherin) (CDH6); Cadherin-8 (CDH8); Cadherin-9 (CDH9); Osteoblast (OB-cadherin) (CDH11); Brain (BR-cadherin) (CDH12); T-cadherin (truncated cadherin) (CDH13); Muscle (M-cadherin) (CDH15); Kidney (Ksp-cadherin) (CDH16); and Liver-intestine (LI-cadherin) (CDH17).

[0418] Structurally, cadherins are built of the following domains: a signal sequence, followed by a propeptide of about 130 residues, then an extracellular domain of around 600 residues, then a transmembrane region, and finally a C-terminal cytoplasmic domain of about 150 residues. The extracellular domain can be sub-divided into five parts: there are four repeats of about 110 residues followed by a region that contains four conserved cysteines. The calcium-binding region of cadherins may be located in the extracellular repeats. The signature pattern for the repeated domain is located in the C-terminal extremity, which is its best conserved region. The pattern includes two conserved aspartic acid residues and two asparagines; these residues could be implicated in the binding of calcium. The consensus pattern is: [LIV]-x-[LIV]-x-D-x-N-D-[NH]-x-P.

[0419] CBS domain (CBS; Pfam Accession No. PF00571). SEQ ID NOS:1643 and 1644 represent polypeptides having sequence similarity to CBS domains, which are present in all 3 forms of cellular life, including two copies in inosine monophosphate dehydrogenase, of which one is disordered in the crystal structure. A number of disease states are associated with CBS-containing proteins including homocystinuria, Becker's and Thomsen disease.

[0420] CBS domains are small intracellular modules of unknown function. They are mostly found in 2 or four copies within a protein. Pairs of CBS domains dimerise to form a stable globular domain (Zhang et al., Biochemistry 38:4691-4700 (1999)). Two CBS domains are found in inosine-monophosphate dehydrogenase from all species, however the CBS domains are not needed for activity. CBS domains are found attached to a wide range of other protein domains suggesting that CBS domains may play a regulatory role. The region containing the CBS domains in Cystathionine-beta synthase is involved in regulation by S-AdoMet (Zhang et al., Biochemistry 38:4691-4700 (1999)). The 3D Structure is found as a sub-domain in TIM barrel of inosine-monophosphate dehydrogenase.

[0421] Phorbol esters/diacylglycerol binding domain (C1 domain) (DAG_PE-bind: Pfam Accessin No. PF00130). SEQ ID NO: 1647 represents a polypeptide having sequence similarity to the Phorbol esters/diacylglycerol binding domain (C1 domain). Diacylglycerol (DAG) is an important second messenger. Phorbol esters (PE) are analogues of DAG and potent tumor promoters that cause a variety of physiological changes when administered to both cells and tissues. DAG activates a family of serine/threonine protein kinases, collectively known as protein kinase C (PKC) (Azzi et al., Eur. J. Biochem. 208:547-557 (1992)). Phorbol esters can also directly stimulate PKC.

[0422] The N-terminal region of PKC, known as C1, has been shown to bind PE and DAG in a phospholipid and zinc-dependent fashion (Ono et al., Proc. Natl. Acad. Sci. U.S.A. 86:4868-4871 (1989)). The C1 region contains one or two copies (depending on the isozyme of PKC) of a cysteine-rich domain about 50 amino-acid residues long and essential for DAG/PE-binding. The DAG/PE-binding domain binds two zinc ions; the ligands of these metal ions are probably the six cysteines and two histidines that are conserved in the C1 domain. The consensus sequence for the C1 domain is: H-x-[LIVMFYW]-x(8,11)-C-x(2)-C-x(3)-[LIVMFC]-x(5,10)-C-x(2)-C-x(4)-[HD]-x(2)-C-x(5,9)-C [All the C and H are involved in binding Zinc].

[0423] GATA zinc finger (GATA; Pfam Accession No. PF00320). SEQ ID NO:1653 represents a polypeptide having sequence similarity to GATA zinc finger. A number of transcription factors, including erythroid-specific transcription factor and nitrogen regulatory proteins, specifically bind the DNA sequence (A/T)GATA(A/G) in the regulatory regions of genes (Yamamoto et al., Genes Dev. 4:1650-1662 (1990)) and are consequently termed GATA-binding transcription factors. The interactions occur via highly-conserved zinc finger domains in which the zinc ion is coordinated by 4 cysteine residues (Evans and Felsenfeld, Cell 58:877-885 (1989); Omichinski et al., Science 261:438-446 (1993)).

[0424] NMR studies have shown the core of the zinc finger to comprise 2 irregular anti-parallel beta-sheets and an alpha-helix, followed by a long loop to the C-terminal end of the finger. The N-terminal part, which includes the helix, is similar in structure, but not sequence, to the N-terminal zinc module of the glucocorticoid receptor DNA-binding domain. The helix and the loop connecting the 2 beta-sheets interact with the major groove of the DNA, while the C-terminal tail wraps around into the minor groove. It is this tail that is the essential determinant of specific binding. Interactions between the zinc finger and DNA are mainly hydrophobic, explaining the preponderance of thymines in the binding site; a large number of interactions with the phosphate backbone have also been observed (Omichinski et al., Science 261:438-446 (1993)). Two GATA zinc fingers are found in the GATA transcription factors; however, there are several proteins which only contains a single copy of the domain. The consensus sequence of the domain is: C-x-[DN]-C-x(4,5)-[ST]-x(2)-W-[HR]-[RK]-x(3)-[GN]-x(3,4)-C-N-[AS]-C [The four C's are zinc ligands].

[0425] Glutathione S-transferase, N-terminal domain (GST_N: Pfam Accession No. PF02798). SEQ ID NO: 1640 represents a polypeptide having sequence similarity to Glutathione S-transferase, N-terminal domain. In eukaryotes, glutathione S-transferases (GSTs) participate in the detoxification of reactive electrophilic compounds by catalysing their conjugation to glutathione. The GST domain is also found in S-crystallins from squid, and proteins with no known GST activity, such as eukaryotic elongation factors 1-gamma and the HSP26 family of stress-related proteins, which include auxin-regulated proteins in plants and stringent starvation proteins in E. coli. The major lens polypeptide of Cephalopoda is also a GST.

[0426] Bacterial GSTs of known function often have a specific, growth-supporting role in biodegradative metabolism: epoxide ring opening and tetrachlorohydroquinone reductive dehalogenation are two examples of the reactions catalysed by these bacterial GSTs. Some regulatory proteins, like the stringent starvation proteins, also belong to the GST family. GST seems to be absent from Archaea in which gamma-glutamylcysteine substitute to glutathione as major thiol.

[0427] Glutathione S-transferases form homodimers, but in eukaryotes can also form heterodimers of the A1 and A2 or YC1 and YC2 subunits. The homodimeric enzymes display a conserved structural fold. Each monomer is composed of a distinct N-terminal sub-domain, which adopts the thioredoxin fold, and a C-terminal all-helical sub-domain.

[0428] GTF2I-like repeat (GTF2I; Pfam Accession No. PF02946). SEQ ID NOS:1633, 1634, and 1675 represent polypeptides having sequence similarity to proteins having GTF2I-like repeat. This region of sequence similarity is found up to six times in a variety of proteins including GTF2I. It has been suggested that this may be a DNA binding domain (O'Mahoney et al., Mol. Cell. Biol. 18:6641-6652 (1998); Osborne et al., Genomics 57:279-284 (1999)).

[0429] Core histone H2A/H2B/H3/H4 (histone; Pfam Accession No. PF00125). SEQ ID NO:1630 represents a polypeptide having sequence similarity to core histone H2A/H2B/H3/H4 family polypeptides. Histone H2A is one of the four histones, along with H2B, H3 and H4, which forms the eukaryotic nucleosome core. Using alignments of histone H2A sequences (Wells and Brown, Nucleic Acids Res. 19:2173-2188(1991); Thatcher and Gorovsky, Nucleic Acids Res. 22:174-179(1994)) a conserved region in the N-terminal part of H2A was used to develop a signature pattern. This region is conserved both in classical S-phase regulated H2A's and in variant histone H2A's which are synthesized throughout the cell cycle. The consensus pattern is: [AC]-G-L-x-F-P-V.

[0430] Histone H4, along with H3, plays a central role in nucleosome formation. The sequence of histone H4 has remained almost invariant in more then 2 billion years of evolution (Thatcher and Gorovsky, Nucleic Acids Res. 22:174-179(1994)). The region used as a signature pattern is a pentapeptide found in positions 14 to 18 of all H4 sequences. It contains a lysine residue which is often acetylated (Doenecke and Gallwitz, Mol. Cell. Biochem. 44:113-128(1982)) and a histidine residue which is implicated in DNA-binding (Ebralidse et al., Nature 331:365-367(1988)). The consensus pattern is: G-A-K-R-H.

[0431] Histone H3 is a highly conserved protein of 135 amino acid residues (Wells and Brown, Nucleic Acids Res. 19:2173-2188(1991); Thatcher and Gorovsky, Nucleic Acids Res. 22:174-179(1994)). Two signature patterns have been developed, the first one corresponds to a perfectly conserved heptapeptide in the N-terminal part of H3, while the second one is derived from a conserved region in the central section of H3. The consensus patterns are: K-A-P-R-K-Q-L and P-F-x-[RA]-L-[VA]-[KRQ]-[DEG]-[IV].

[0432] The signature pattern of histone H2B corresponds to a conserved region in the C-terminal part of the protein. The consensus pattern is: [KR]-E-[LIVM]-[EQ]-T-x(2)-[KR]-x-[LIVM](2)-x-[PAG]-[DE]-L-x-[KR]-H-A-[LIVM]-[STA]-E-G

[0433] HMG (high mobility group) box (HMG_box: Pfam Accession No. PF00505). SEQ ID NO:1658 corresponds to a polypeptide having sequence similarity to high mobility group proteins, a family of relatively low molecular weight non-histone components in chromatin. HMG1 (also called HMG-T in fish) and HMG2 (Bustin et al., Biochim. Biophys. Acta 1049: 231-243(1990)) are two highly related proteins that bind single-stranded DNA preferentially and unwind double-stranded DNA. HMG1/2 have about 200 amino acid residues with a highly acidic C-terminal section which is composed of an uninterrupted stretch of from 20 to 30 aspartic and glutamic acid residues; the rest of the protein sequence is very basic. In addition to the HMG1 and HMG2 proteins, HMG-domains occur in single or multiple copies in the following protein classes; the SOX family of transcription factors; SRY sex determining region Y protein and related proteins; LEF1 lymphoid enhancer binding factor 1; SSRP recombination signal recognition protein; MTF1 mitochondrial transcription factor 1; UBF1/2 nucleolar transcription factors; Abf2 yeast ARS-binding factor; and yeast transcription factors Ixr1, Rox1, Nhp6a, Nhp6b and Spp41.

[0434] Importin beta binding domain (IBB: Pfam Accession No. PF01749). SEQ ID NO: 1619 represents a polypeptide having sequence similarity to importin beta binding domain family polypeptides. This family consists of the importin alpha (karyopherin alpha), importin beta (karyopherin beta) binding domain. The domain mediates formation of the importin alpha beta complex; required for classical NLS import of proteins into the nucleus, through the nuclear pore complex and across the nuclear envelope. Also in the alignment is the NLS of importin alpha which overlaps with the IBB domain (Moroianu et al., Proc. Natl. Acad. Sci. U.S.A. 93:6572-6576(1996)).

[0435] T-box domain (T-box: Pfam Accession No. PF00907). SEQ ID NOS:1651 represents a polypeptide having sequence similarity to proteins having a T-box domain. The T-box gene family is an ancient group of putative transcription factors that appear to play a critical role in the development of all animal species. These genes were uncovered on the basis of similarity to the DNA binding domain (Papaioannou and Silver, Bioessays 20:9-19 (1998)) of murine Brachyury (T) gene product, which similarity is the defining feature of the family. The Brachyury gene is named for its phenotype, which was identified 70 years ago as a mutant mouse strain with a short blunted tail. The gene, and its paralogues, have become a well-studied model for the family, and hence much of what is known about the T-box family is derived from the murine Brachyury gene.

[0436] Consistent with its nuclear location, Brachyury protein has a sequence-specific DNA-binding activity and can act as a transcriptional regulator (Wattler et al., Genomics 48:24-33(1998)). Homozygous mutants for the gene undergo extensive developmental anomalies, thus rendering the mutation lethal (Kavka and Green, Biochim. Biophys. Acta 1333(2) (1997)). The postulated role of Brachyury is as a transcription factor, regulating the specification and differentiation of posterior mesoderm during gastrulation in a dose-dependent manner (Papaioannou and Silver, Bioessays 20:9-19 (1998)).

[0437] Common features shared by T-box family members are, DNA-binding and transcriptional regulatory activity, a role in development and conserved expression patterns. Most of the known genes in all species are expressed in mesoderm or mesoderm precursors (Papaioannou, Trends Genet. 13:212-213(1997)). Members of the T-box family contain a domain of about 170 to 190 amino acids known as the T-box domain (Papaioannou, Trends Genet. 13: 212-213(1997); Bollag et al., Nat. Genet. 7: 383-389(1994); Agulnik et al., Genetics 144:249-254(1996)) and which probably binds DNA. As signature patterns for the T-domain, we selected two conserved regions. The first region corresponds to the N-terminal of the domain and the second one to the central part. The consensus sequences are: L-W-x(2)-[FC]-x(3,4)-[NT]-E-M-[LIV](2)-T-x(2)-G-[RG]-[KRQ] and [LIVMFYW]-H-[PADH]-[DENQ]-[GS]-x(3)-G-x(2)-W-M-x(3)-[IVA]-x-F.

[0438] 60s Acidic ribosomal protein (60s_ribosomal; Pfam Accession No. PF00428). SEQ ID NO: 1038 represents a polynucleotide encoding a member of the 60s acidic ribosomal protein family. The 60S acidic ribosomal protein plays an important role in the elongation step of protein synthesis. This family includes archaebacterial L12, eukaryotic P0, P1 and P2 (Remacha et al., Biochem. Cell Biol. 73:959-968(1995)).

[0439] Some of the proteins in this family are allergens. A nomenclature system has been established for antigens (allergens) that cause IgE-mediated atopic allergies in humans (WHO/IUIS Allergen Nomenclature Subcommittee King T. P., Hoffmann D., Loewenstein H., Marsh D. G., Platts-Mills T. A. E., Thomas W. Bull. World Health Organ. 72:797-806(1994)). This nomenclature system is defined by a designation that is composed of the first three letters of the genus; a space; the first letter of the species name; a space and an arabic number. In the event that two species names have identical designations, they are discriminated from one another by adding one or more letters (as necessary) to each species designation. The allergens in this family include allergens with the following designations: Alt a 6, Alt a 12, Cla h 3, Cla h 4, and Cla h 12.

[0440] AP endonuclease family 1 (AP_endonucleas1; Pfam Accession No. PF01260). SEQ ID NOS:491 and 969 correspond to a polynucleotide encoding a member of the family of polypeptides designated AP endonuclease family 1. DNA damaging agents such as the antitumor drugs bleomycin and neocarzinostatin or those that generate oxygen radicals produce a variety of lesions in DNA. Amongst these is base-loss which forms apurinic/apyrimidinic (AP) sites or strand breaks with atypical 3′-termini. DNA repair at the AP sites is initiated by specific endonuclease cleavage of the phosphodiester backbone. Such endonucleases are also generally capable of removing blocking groups from the 3′-terminus of DNA strand breaks.

[0441] AP endonucleases can be classified into two families on the basis of sequence similarity. This family contains members of AP endonuclease family 1. Except for Rrp1 and arp, these enzymes are proteins of about 300 amino-acid residues. Rrp1 and arp both contain additional and unrelated sequences in their N-terminal section (about 400 residues for Rrp1 and 270 for arp). The proteins contain glutamate which has been shown (Mol et al., Nature 374: 381-386(1995)), in the Escherichia coli enzyme to bind a divalent metal ion such as magnesium or manganese. The consensus sequences for this family of polypeptides are: [APF]-D-[LIVMF](2)-x-[LIVM]-Q-E-x-K [E binds a divalent metal ion]; D-[ST]-[FY]-R-[KH]-x(7,8)-[FYW]-[ST]-[FYW](2); and N-x-G-x-R-[LIVM]-D-[LIVMFYH]-x-[LV]-x-S

[0442] Bowman-Birk serine protease inhibitor family (Bowman-Birk_leg; Pfam Accession No. 00228). SEQ ID NO: 454 represents a polynucleotide encoding a polypeptide having sequence similarity to a member of the Bowman-Birk serine protease inhibitor family. The Bowman-Birk inhibitor family (Laskowski and Kato, Annu. Rev. Biochem. 49:593-626(1980)) is one of the numerous families of serine proteinase inhibitors and has a duplicated structure and generally possesses two distinct inhibitory sites.

[0443] These inhibitors are found in the seeds of all leguminous plants as well as in cereal grains. In cereals they exist in two forms, one of which is a duplication of the basic structure (Tashiro et al., J. Biochem. 102:297-306(1987)). The signature pattern for sequences belonging to this family of inhibitors is in the central part of the domain and includes four cysteines. The consensus pattern is: C-x(5,6)-[DENQKRHSTA]-C-[PASTDH]-[PASTDK]-[ASTDV]-C-[NDEKS]-[DEKRHSTA]-C [The four C's are involved in disulfide bonds]. Note that this pattern can be found twice in some duplicated cereal inhibitors.

[0444] Cation efflux family (Cation_efflux: Pfam Accession No. PF01545). SEQ ID NO: 454 encodes a polypeptide having sequence similarity to members of the cation efflux family of proteins. Members of this family are integral membrane proteins, that are found to increase tolerance to divalent metal ions such as cadmium, zinc, and cobalt. These proteins are thought to be efflux pumps that remove these ions from cells (Xiong and Jayaswal, J. Bacteriol. 180: 4024-4029(1998); Kunito et al, Biosci. Biotechnol. Biochem. 60: 699-704(1996)).

[0445] DC1 domain (DC1; Pfam Accession No. PF03107). SEQ ID NO: 222 corresponds to a polypeptide having sequence similarity to a DC1 domain. This short domain is rich in cysteines and histidines. The pattern of conservation is similar to that found in DAG_PE-bind (Pfam Accession No. PF00130), therefore this domain has been termed DC1 for divergent C1 domain. Like the DAG_PE-bind domain, this domain probably also binds to two zinc ions. The function of proteins with this domain is uncertain, however this domain may bind to molecules such as diacylglycerol. This family are found in plant proteins.

[0446] Pneumovirus attachment glycoprotein G (Glycoprotein_G; Pfam Accession No. PF00802). SEQ ID NO:1128 represents a polypeptide having sequence similarity to members of the Pneumovirus attachment glycoprotein G protein family. This family includes attachment proteins from respiratory synctial virus. Glycoprotein G has not been shown to have any neuramimidase or hemagglutinin activity. The amino terminus is thought to be cytoplasmic, and the carboxyl terminus extracellular. The extracellular region contains four completely conserved cysteine residues.

[0447] NADH-Ubiquinone/plastoquinone (complex I), various chains (oxidored_q 1; Pfam Accession No. PF00361). SEQ ID NO:546 represents a polypeptide having sequence similarity to NADH-Ubiquinone/plastoquinone (complex I), various chains protein family. This family is part of the NADH:ubiquinone oxidoreductase (complex I) which catalyses the transfer of two electrons from NADH to ubiquinone in a reaction that is associated with proton translocation across the membrane (Walker, Q. Rev. Biophys. 25: 253-324(1992)). Sub-families within this protein family include NADH-ubiquinone oxidoreductase chain 5; NADH-ubiquinone oxidoreductase chain 2; NADH-ubiquinone oxidoreductase chain 4; and Multicomponent K+:H+antiporter.

[0448] Protamine P1 (protamine_P1; Pfam Accession No. PF00260). SEQ ID NOS:778 and 1450 represent polypeptides having sequence similarity to Protamine P1 protein family. Protamines are small, highly basic proteins, that substitute for histones in sperm chromatin during the haploid phase of spermatogenesis. They pack sperm DNA into a highly condensed, stable and inactive complex. There are two different types of mammalian protamine, called P1 and P2. P1 has been found in all species studied, while P2 is sometimes absent. There also seems to be a single type of avian protamine whose sequence is closely related to that of mammalian P1 (Oliva et al., J. Biol. Chem. 264:17627-17630(1989)). A conserved region at the N-terminal extremity of the sequence is used as a signature pattern for this family of proteins. The consensus pattern is: [AV]-R-[NFY]-R-x(2,3)-[ST]-x-S-x-S.

[0449] Squash family serine protease inhibitor (squash; Pfam Accession No. PF00299). SEQ ID NO:1128 represents a polypeptide having sequence similarity to Squash family serine protease inhibitor proteins. The squash inhibitors form one of a number of serine protease inhibitor families. The proteins, found in the seeds of cucurbitaceae plants (squash, cucumber, balsam pear, etc.), are approximately 30 residues in length, and contain 6 Cys residues, which form 3 disulfide bonds (Bode et al., FEBS Lett. 242: 285-292(1989)). The inhibitors function by being taken up by a serine protease (such as trypsin), which cleaves the peptide bond between Arg/Lys and Ile residues in the N-terminal portion of the protein (Bode et al., FEBS Lett. 242: 285-292(1989); Krishnamoorthi et al., Biochemistry 31: 898-904(1992)). Structural studies have shown that the inhibitor has an ellipsoidal shape, and is largely composed of beta-turns (Bode et al., FEBS Lett. 242: 285-292(1989)). The fold and Cys connectivity of the proteins resembles that of potato carboxypeptidase A inhibitor (Krishnamoorthi et al., Biochemistry 31: 898-904(1992)). The pattern used to detect this family of proteins spans the major part of the sequence and includes five of the six cysteines involved in disulfide bonds. The consensus pattern is: C-P-x(5)-C-x(2)-[DN]-x-D-C-x(3)-C-x-C [The five C's are involved in disulfide bonds]

[0450] Metallothionein family 5 (Metallothio_{—}5: Pfam Accession No. PF02067). SEQ ID NO:1128 represents a polypeptide having sequence similarity to metallothionein family 5 proteins. Metallothioneins (MT) are small proteins that bind heavy metals, such as zinc, copper, cadmium, and nickel. They have a high content of cysteine residues that bind the metal ions through clusters of thiolate bonds (Kagi, Meth. Enzymol. 205: 613-626(1991); Kagi and Kojima, Experientia Suppl. 52: 25-61(1987); Kagi and Schaffer, Biochemistry 27: 8509-8515(1988)).

[0451] Due to limitations in the original classification system of MTs, which did not allow clear differentiation of patterns of structural similarities, either between or within classes, all class I and class II MTs (the proteinaceous sequences) have now been grouped into families of phylogenetically-related and thus alignable sequences. Diptera (Drosophila, family 5) MTs are 40-43 residue proteins that contain 10 conserved cysteines arranged in five Cys-X-Cys groups. In particular, the consensus pattern C-G-x(2)-C-x-C-x(2)-Q-x(5)-C-x-C-x(2)-D-C-x-C has been found to be diagnostic of family 5 MTs. The protein is found primarily in the alimentary canal, and its induction is stimulated by ingestion of cadmium or copper (Lastowski et al., J. Biol. Chem. 260: 1527-1530(1985)). Mercury, silver and zinc induce the protein to a lesser extent.

[0452] Caenorhabditis. elegans Sre G protein-coupled chemoreceptor (Sre; Pfam Accession No. PF03125). SEQ ID NO:724 represents a polypeptide having sequence similarity to C. elegans Sre G protein-coupled chemoreceptor family proteins. C. elegans Sre proteins are candidate chemosensory receptors. There are four main recognized groups of such receptors: Odr-10, Sra, Sro, and Srg. Sre (this family), Sra Sra and Srb Srb comprise the Sra group. All of the above receptors are thought to be G protein-coupled seven transmembrane domain proteins (Troemel, Bioessays 21:1011-1020 (1999); Troemel et al., Cell 83:207-218 (1995)).

[0453] Syndecan domain (Syndecan; Pfam Accession No. PF01034). SEQ ID NO:1128 corresponds to a polypeptide having a syndecan domain. Syndecans (Bernfield et al., Annu. Rev. Cell Biol. 8:365-393(1992); David, FASEB J. 7:1023-1030(1993)) are a family of transmembrane heparan sulfate proteoglycans which are implicated in the binding of extracellular matrix components and growth factors. Syndecans bind a variety of molecules via their heparan sulfate chains and can act as receptors or as co-receptors. Structurally, these proteins consist of four separate domains: a) a signal sequence; b) an extracellular domain (ectodomain) of variable length containing the sites of attachment of the heparan sulfate glycosaminoglycan side chains and whose sequence is not evolutionarily conserved in the various forms of syndecans; c) a transmembrane region; and d) a highly conserved cytoplasmic domain of about 30 to 35 residues which could interact with cytoskeletal proteins.

[0454] The signature pattern for syndecans starts with the last residue of the transmembrane region and includes the first 10 residues of the cytoplasmic domain. This region, which contains four basic residues, may act as a stop transfer site. The consensus pattern is: [FY]-R-[IM]-[KR]-K(2)-D-E-G-S-Y.

[0455] L1 transposable element (Transposase_{—}22; Pfam Accession No. PF02994). SEQ ID NO:907 represents a polypeptide having an L1 transposable element. Many human L1 elements are capable of retrotransposition and some of these have been shown to exhibit reverse transcriptase (RT) activity (Sassaman et al., Nat Genet 16(1):37-43(1997)) although the function of many are, as yet, unknown. There are estimated to be 30-60 active L1 elements reside in the average diploid genome.

[0456] WW domain (WW; Pfam Accession No. PF00397). SEQ ID NO:564 represents a polypeptide having WW domain. The WW domain (also known as rsp5 or WWP) is a short conserved region in a number of unrelated proteins, among them dystrophin, responsible for Duchenne muscular dystrophy. This short domain may be repeated up to four times in some proteins (Bork and Sudol, Trends Biochem. Sci. 19: 531-533(1994); Andre and Springael, Biochem. Biophys. Res. Commun. 205: 1201-1205(1994); Hofmann and Bucher, FEBS Lett. 358: 153-157(1995); Sudol et al., FEBS Lett. 369: 67-71(1995)). The WW domain binds to proteins with particular proline-motifs, [AP]-P-P-[AP]-Y, and having four conserved aromatic positions that are generally Trp (Chen and Sudol, Proc. Natl. Acad. Sci. U.S.A. 92: 7819-7823(1995)). The name WW or WWP derives from the presence of these Trp as well as that of a conserved Pro. The WW domain is frequently associated with other domains typical for proteins in signal transduction processes.

[0457] A large variety of proteins containing the WW domain are known. These include; dystrophin, a multidomain cytoskeletal protein; utrophin, a dystrophin-like protein of unknown function; vertebrate YAP protein, substrate of an unknown serine kinase; mouse NEDD-4, involved in the embryonic development and differentiation of the central nervous system; yeast RSP5, similar to NEDD-4 in its molecular organization; rat FE65, a transcription-factor activator expressed preferentially in liver; tobacco DB10 protein and others. The consensus pattern is: W-x(9,11)-[VFY]-[FYW]-x(6,7)-[GSTNE]-[GSTQCR]-[FYW]-x(2)-P.

### Example 22

### Detection of Differential Expression Using Arrays and Source of Patient Tissue Samples

[0458] mRNA isolated from samples of cancerous and normal breast and colon tissue obtained from patients were analyzed to identify genes differentially expressed in cancerous and normal cells. Normal and cancerous tissues were collected from patients using laser capture microdissection (LCM) techniques, which techniques are well known in the art (see, e.g., Ohyama et al. (2000) Biotechniques 29:530-6; Curran et al. (2000) Mol. Pathol. 53:64-8; Suarez-Quian et al. (1999) Biotechniques 26:328-35; Simone et al. (1998) Trends Genet 14:272-6; Conia et al. (1997) J. Clin. Lab. Anal. 11:28-38; Emmert-Buck et al. (1996) Science 274:998-1001).

[0459] Table 20 (inserted prior to claims) provides information about each patient from which colon tissue samples were isolated, including: the Patient ID (“PT ID”) and Path ReportID (“Path ID”), which are numbers assigned to the patient and the pathology reports for identification purposes; the group (“Grp”) to which the patients have been assigned; the anatomical location of the tumor (“Anatom Loc”); the primary tumor size (“Size”); the primary tumor grade (“Grade”); the identification of the histopathological grade (“Histo Grade”); a description of local sites to which the tumor had invaded (“Local Invasion”); the presence of lymph node metastases (“Lymph Met”); the incidence of lymph node metastases (provided as a number of lymph nodes positive for metastasis over the number of lymph-nodes examined) (“Lymph Met Incid”); the regional lymphnode grade (“Reg Lymph Grade”); the identification or detection of metastases to sites distant to the tumor and their location (“Dist Met & Loc”); the grade of distant metastasis (“Dist Met Grade”); and general comments about the patient or the tumor (“Comments”). Histophatology of all primary tumors indicated the tumor was adenocarcinmoa except for Patient ID Nos. 130 (for which no information was provided), 392 (in which greater than 50% of the cells were mucinous carcinoma), and 784 (adenosquamous carcinoma). Extranodal extensions were described in three patients, Patient ID Nos. 784, 789, and 791. Lymphovascular invasion was described in Patient ID Nos. 128, 278, 517, 534, 784, 786, 789, 791, 890, and 892. Crohn's-like infiltrates were described in seven patients, Patient ID Nos. 52, 264, 268, 392, 393, 784, and 791. Table 21 (below) provides information about each patient from which the breast tissue samples were isolated, including: 1) the “Pat Num”, a number assigned to the patient for identification purposes; 2) the “Histology”, which indicates whether the tumor was characterized as an intraductal carcinoma (IDC) or ductal carcinoma in situ (DCIS); 3) the incidence of lymph node metastases (LMF), represented as the number of lymph nodes positive to metastases out of the total number examined in the patient; 4) the “Tumor Size”; 5) “TNM Stage”, which provides the tumor grade (T#), where the number indicates the grade and “p” indicates that the tumor grade is a pathological classification; regional lymph node metastasis (N#), where “0” indicates no lymph node metastases were found, “1” indicates lymph node metastases were found, and “X” means information not available and; the identification or detection of metastases to sites distant to the tumor and their location (M#), with “X” indicating that no distant mesatses were reported; and the stage of the tumor (“Stage Grouping”). “nr” indicates “no reported”.

TABLE 20

| | | | | | | | | | Lymph | Reg | Dist | Dist | |
|---|---|---|---|---|---|---|---|---|---|---|---|---|---|
| | Path | | Anatom | | | Histo | | Lymph | Met | Lymph | Met & | Met | |
| Pt ID | ID | Grp | Loc | Size | Grade | Grade | Local Invasion | Met | Incid | Grade | Loc | Grade | Comment |
| 15 | 21 | III | Ascending | 4.0 | T3 | G2 | Extending into | Pos | 3/8 | N1 | Neg | MX | invasive |
| | | | colon | | | | subserosal adipose | | | | | | adenocarcinoma, |
| | | | | | | | tissue | | | | | | moderately |
| | | | | | | | | | | | | | differentiated; |
| | | | | | | | | | | | | | focal perineural |
| | | | | | | | | | | | | | invasion is seen |
| 52 | 71 | II | Cecum | 9.0 | T3 | G3 | Invasion through | Neg | 0/12 | N0 | Neg | M0 | Hyperplastic |
| | | | | | | | muscularis | | | | | | polyp in |
| | | | | | | | propria, subserosal | | | | | | appendix. |
| | | | | | | | involvement; | | | | | | |
| | | | | | | | ileocec. valve | | | | | | |
| | | | | | | | involvement | | | | | | |
| 121 | 140 | II | Sigmoid | 6 | T4 | G2 | Invasion of | Neg | 0/34 | N0 | Neg | M0 | Perineural |
| | | | | | | | muscularis propria | | | | | | invasion; donut |
| | | | | | | | into serosa, | | | | | | anastomosis |
| | | | | | | | involving | | | | | | Neg. One |
| | | | | | | | submucosa of | | | | | | tubulovillous |
| | | | | | | | urinary bladder | | | | | | and one tubular |
| | | | | | | | | | | | | | adenoma with |
| | | | | | | | | | | | | | no high grade |
| | | | | | | | | | | | | | dysplasia. |
| 125 | 144 | II | Cecum | 6 | T3 | G2 | Invasion through | Neg | 0/19 | N0 | Neg | M0 | patient history |
| | | | | | | | the muscularis | | | | | | of metastatic |
| | | | | | | | propria into | | | | | | melanoma |
| | | | | | | | suserosal adipose | | | | | | |
| | | | | | | | tissue. Ileocecal | | | | | | |
| | | | | | | | junction. | | | | | | |
| 128 | 147 | III | Transverse | 5.0 | T3 | G2 | Invasion of | Pos | 1/5 | N1 | Neg | M0 | |
| | | | colon | | | | muscularis propria | | | | | | |
| | | | | | | | into percolonic fat | | | | | | |
| 130 | 149 | | Splenic | 5.5 | T3 | | through wall and | Pos | 10/24 | N2 | Neg | M1 | |
| | | | flexure | | | | into surrounding | | | | | | |
| | | | | | | | adipose tissue | | | | | | |
| 133 | 152 | II | Rectum | 5.0 | T3 | G2 | Invasion through | Neg | 0/9 | N0 | Neg | M0 | Small separate |
| | | | | | | | muscularis propria | | | | | | tubular |
| | | | | | | | into non- | | | | | | adenoma (0.4 cm) |
| | | | | | | | peritonealized | | | | | | |
| | | | | | | | pericolic tissue; | | | | | | |
| | | | | | | | gross | | | | | | |
| | | | | | | | configuration is | | | | | | |
| | | | | | | | annular. | | | | | | |
| 141 | 160 | IV | Cecum | 5.5 | T3 | G2 | Invasion of | Pos | 7/21 | N2 | Pos - | M1 | Perineural |
| | | | | | | | muscularis propria | | | | Liver | | invasion |
| | | | | | | | into pericolonic | | | | | | identified |
| | | | | | | | adipose tissue, but | | | | | | adjacent to |
| | | | | | | | not through serosa. | | | | | | metastatic |
| | | | | | | | Arising from | | | | | | adenocarcinoma. |
| | | | | | | | tubular adenoma. | | | | | | |
| 156 | 175 | III | Hepatic | 3.8 | T3 | G2 | Invasion through | Pos | 2/13 | N1 | Neg | M0 | Separate |
| | | | flexure | | | | muscularis propria | | | | | | tubolovillous |
| | | | | | | | into | | | | | | and tubular |
| | | | | | | | subserosa/pericolic | | | | | | adenomas |
| | | | | | | | adipose, no serosal | | | | | | |
| | | | | | | | involvement. | | | | | | |
| | | | | | | | Gross | | | | | | |
| | | | | | | | configuration | | | | | | |
| | | | | | | | annular. | | | | | | |
| 228 | 247 | III | Rectum | 5.8 | T3 | G2 to | Invasion through | Pos | 1/8 | N1 | Neg | MX | Hyperplastic |
| | | | | | | G3 | muscularis propria | | | | | | polyps |
| | | | | | | | to involve | | | | | | |
| | | | | | | | subserosal, | | | | | | |
| | | | | | | | perirectoal | | | | | | |
| | | | | | | | adipose, and | | | | | | |
| | | | | | | | serosa | | | | | | |
| 264 | 283 | II | Ascending | 5.5 | T3 | G2 | Invasion through | Neg | 0/10 | N0 | Neg | M0 | Tubulovillous |
| | | | colon | | | | muscularis propria | | | | | | adenoma with |
| | | | | | | | into subserosal | | | | | | high grade |
| | | | | | | | adipose tissue. | | | | | | dysplasia |
| 266 | 285 | III | Transverse | 9 | T3 | G2 | Invades through | Neg | 0/15 | N1 | Pos - | MX | |
| | | | colon | | | | muscularis propria | | | | Mesen- | | |
| | | | | | | | to involve | | | | teric | | |
| | | | | | | | pericolonic | | | | deposit | | |
| | | | | | | | adipose, extends to | | | | | | |
| | | | | | | | serosa. | | | | | | |
| 268 | 287 | I | Cecum | 6.5 | T2 | G2 | Invades full | Neg | 0/12 | N0 | Neg | M0 | |
| | | | | | | | thickness of | | | | | | |
| | | | | | | | muscularis | | | | | | |
| | | | | | | | propria, but | | | | | | |
| | | | | | | | mesenteric adipose | | | | | | |
| | | | | | | | free of malignancy | | | | | | |
| 278 | 297 | III | Rectum | 4 | T3 | G2 | Invasion into | Pos | 7/10 | N2 | Neg | M0 | Descending |
| | | | | | | | perirectal adipose | | | | | | colon polyps, |
| | | | | | | | tissue. | | | | | | no HGD or |
| | | | | | | | | | | | | | carcinoma |
| | | | | | | | | | | | | | identified. |
| 296 | 315 | III | Cecum | 5.5 | T3 | G2 | Invasion through | Pos | 2/12 | N1 | Neg | M0 | Tubulovillous |
| | | | | | | | muscularis propria | | | | | | adenoma (2.0 cm) |
| | | | | | | | and invades | | | | | | with no |
| | | | | | | | pericolic adipose | | | | | | high grade |
| | | | | | | | tissue. Ileocecal | | | | | | dysplasia. Neg. |
| | | | | | | | junction. | | | | | | liver biopsy. |
| 339 | 358 | II | Recto- | 6 | T3 | G2 | Extends into | Neg | 0/6 | N0 | Neg | M0 | 1 hyperplastic |
| | | | sigmoid | | | | perirectal fat but | | | | | | polyp identified |
| | | | | | | | does not reach | | | | | | |
| | | | | | | | serosa | | | | | | |
| 341 | 360 | II | Ascending | 2 cm | T3 | G2 | Invasion through | Neg | 0/4 | N0 | Neg | MX | |
| | | | colon | invasive | | | muscularis propria | | | | | | |
| | | | | | | | to involve | | | | | | |
| | | | | | | | pericolonic fat. | | | | | | |
| | | | | | | | Arising from | | | | | | |
| | | | | | | | villous adenoma. | | | | | | |
| 356 | 375 | II | Sigmoid | 6.5 | T3 | G2 | Through colon | Neg | 0/4 | N0 | Neg | M0 | |
| | | | | | | | wall into | | | | | | |
| | | | | | | | subserosal adipose | | | | | | |
| | | | | | | | tissue. No serosal | | | | | | |
| | | | | | | | spread seen. | | | | | | |
| 360 | 412 | III | Ascending | 4.3 | T3 | G2 | Invasion thru | Pos | 1/5 | N1 | Neg | M0 | Two mucosal |
| | | | colon | | | | muscularis propria | | | | | | polyps |
| | | | | | | | to pericolonic fat | | | | | | |
| 392 | 444 | IV | Ascending | 2 | T3 | G2 | Invasion through | Pos | 1/6 | N1 | Pos - | M1 | Tumor arising |
| | | | colon | | | | muscularis propria | | | | Liver | | at prior |
| | | | | | | | into subserosal | | | | | | ileocolic |
| | | | | | | | adipose tissue, not | | | | | | surgical |
| | | | | | | | serosa. | | | | | | anastomosis. |
| 393 | 445 | II | Cecum | 6.0 | T3 | G2 | Cecum, invades | Neg | 0/21 | N0 | Neg | M0 | |
| | | | | | | | through | | | | | | |
| | | | | | | | muscularis propria | | | | | | |
| | | | | | | | to involve | | | | | | |
| | | | | | | | subserosal adipose | | | | | | |
| | | | | | | | tissue but not | | | | | | |
| | | | | | | | serosa. | | | | | | |
| 413 | 465 | IV | Cecum | 4.8 | T3 | G2 | Invasive through | Neg | 0/7 | N0 | Pos - | M1 | rediagnosis of |
| | | | | | | | muscularis to | | | | Liver | | oophorectomy |
| | | | | | | | involve periserosal | | | | | | path to |
| | | | | | | | fat; abutting | | | | | | metastatic |
| | | | | | | | ileocecal junction. | | | | | | colon cancer. |
| 505 | 383 | IV | | 7.5 | T3 | G2 | Invasion through | Pos | 2/17 | N1 | Pos - | M1 | Anatomical |
| | | | | | | | muscularis propria | | | | Liver | | location of |
| | | | | | | | involving pericolic | | | | | | primary not |
| | | | | | | | adipose, serosal | | | | | | notated in |
| | | | | | | | surface uninvolved | | | | | | report. |
| | | | | | | | | | | | | | Evidence of |
| | | | | | | | | | | | | | chronic colitis. |
| 517 | 395 | IV | Sigmoid | 3 | T3 | G2 | penetrates | Pos | 6/6 | N2 | Neg | M0 | No mention of |
| | | | | | | | muscularis | | | | | | distant met in |
| | | | | | | | propria, involves | | | | | | report |
| | | | | | | | pericolonic fat. | | | | | | |

[0460] TABLE 21
Breast cancer patient data.

| Pat | | | Tumor | | |
|---|---|---|---|---|---|
| Num | Histology | LMF | Size | TNM Stage | Stage Grouping |
| 280 | IDC, DCIS + | nr | 2 cm | T2NXMX | probable Stage II |
| | D2 | | | | |
| 284 | IDC, DCIS | 0/16 | 2 cm | T2pN0MX | Stage II |
| 285 | IDC, DCIS | nr | 4.5 cm | T2NXMX | probable Stage II |
| 291 | IDC, DCIS | 0/24 | 4.5 cm | T2pN0MX | Stage II |
| 302 | IDC, DCIS | nr | 2.2 cm | T2NXMX | probable Stage II |
| 375 | IDC, DCIS | nr | 1.5 cm | T1NXMX | probable Stage I |
| 408 | IDC | 0/23 | 3.0 cm | T2pN0MX | Stage II |
| 416 | IDC | 0/6 | 3.3 cm | T2pN0MX | Stage II |
| 421 | IDC, DCIS | nr | 3.5 cm | T2NXMX | probable Stage II |
| 459 | IDC | 2/5 | 4.9 cm | T2pN1MX | Stage II |
| 465 | IDC | 0/10 | 6.5 cm | T3pN0MX | Stage II |
| 470 | IDC, DCIS | 0/6 | 2.5 cm | T2pN0MX | Stage II |
| 472 | IDC, DCIS | 6/45 | 5.0+ cm | T3pN1MX | Stage III |
| 474 | IDC | 0/18 | 6.0 cm | T3pN0MX | Stage II |
| 476 | IDC | 0/16 | 3.4 cm | T2pN0MX | Stage II |
| 605 | IDC, DCIS | 1/25 | 5.0 cm | T2pN1MX | Stage II |
| 649 | IDC, DCIS | 1/29 | 4.5 cm | T2pN1MX | Stage II |

[0461] Identification of Differentially Expressed Genes

[0462] cDNA probes were prepared from total RNA isolated from the patient cells described above. Since LCM provides for the isolation of specific cell types to provide a substantially homogenous cell sample, this provided for a similarly pure RNA sample.

[0463] Total RNA was first reverse transcribed into cDNA using a primer containing a T7 RNA polymerase promoter, followed by second strand DNA synthesis. cDNA was the transcribed in vitro to produce antisense RNA using the T7 promoter-mediated expression (see, e.g., Luo et al. (1999) Nature Med 5:117-122), and the antisense RNA was then converted into cDNA. The second set of cDNAs were again transcribed in vitro, using the T7 promoter, to provide antisense RNA. Optionally, the RNA was again converted into cDNA, allowing for up to a third round of T7-mediated amplification to produce more antisense RNA. Thus the procedure provided for two or three rounds of in vitro transcription to produce the final RNA used for fluorescent labeling.

[0464] Fluorescent probes were generated by first adding control RNA to the antisense RNA mix, and producing fluorescently labeled cDNA from the RNA starting material. Fluorescently labeled cDNAs prepared from the tumor RNA sample were compared to fluorescently labeled cDNAs prepared from normal cell RNA sample. For example, the cDNA probes from the normal cells were labeled with Cy3 fluorescent dye (green) and the cDNA probes prepared from the tumor cells were labeled with Cy5 fluorescent dye (red), and vice versa.

[0465] Each array used had an identical spatial layout and control spot set. Each microarray was divided into two areas, each area having an array with, on each half, twelve groupings of 32×12 spots, for a total of about 9,216 spots on each array. The two areas are spotted identically which provide for at least two duplicates of each clone per array.

[0466] Polynucleotides for use on the arrays were obtained from both publicly available sources and from cDNA libraries generated from selected cell lines and patient tissues. PCR products of from about 0.5 kb to 2.0 kb amplified from these sources were spotted onto the array using a Molecular Dynamics Gen III spotter according to the manufacturer's recommendations. The first row of each of the 24 regions on the array had about 32 control spots, including 4 negative control spots and 8 test polynucleotides. The test polynucleotides were spiked into each sample before the labeling reaction with a range of concentrations from 2-600 pg/slide and ratios of 1:1. For each array design, two slides were hybridized with the test samples reverse-labeled in the labeling reaction. This provided for about four duplicate measurements for each clone, two of one color and two of the other, for each sample.

[0467] The differential expression assay was performed by mixing equal amounts of probes from tumor cells and normal cells of the same patient (“matched”) or from tumor cells and normal cells of different patients (“unmatched”) (i.e., the tumor cells are from one patient and the normal cells are from a different patient). The arrays were prehybridized by incubation for about 2 hrs at 60° C. in 5×SSC/0.2% SDS/1 mM EDTA, and then washed three times in water and twice in isopropanol. Following prehybridization of the array, the probe mixture was then hybridized to the array under conditions of high stringency (overnight at 42° C. in 50% formamide, 5×SSC, and 0.2% SDS. After hybridization, the array was washed at 55° C. three times as follows: 1) first wash in 1×SSC/0.2% SDS; 2) second wash in 0.1×SSC/0.2% SDS; and 3) third wash in 0.1×SSC.

[0468] The arrays were then scanned for green and red fluorescence using a Molecular Dynamics Generation III dual color laser-scanner/detector. The images were processed using BioDiscovery Autogene software, and the data from each scan set normalized to provide for a ratio of expression relative to normal. Data from the microarray experiments was analyzed according to the algorithms described in U.S. application Ser. No. 60/252,358, filed Nov. 20, 2000, by E. J. Moler, M. A. Boyle, and F. M. Randazzo, and entitled “Precision and accuracy in cDNA microarray data,” which application is specifically incorporated herein by reference.

[0469] The experiment was repeated, this time labeling the two probes with the opposite color in order to perform the assay in both “color directions.” Each experiment was sometimes repeated with two more slides (one in each color direction). The level fluorescence for each sequence on the array expressed as a ratio of the geometric mean of 8 replicate spots/genes from the four arrays or 4 replicate spots/gene from 2 arrays or some other permutation. The data were normalized using the spiked positive controls present in each duplicated area, and the precision of this normalization was included in the final determination of the significance of each differential. The fluorescent intensity of each spot was also compared to the negative controls in each duplicated area to determine which spots have detected significant expression levels in each sample.

[0470] A statistical analysis of the fluorescent intensities was applied to each set of duplicate spots to assess the precision and significance of each differential measurement, resulting in a p-value testing the null hypothesis that there is no differential in the expression level between the tumor and normal samples of each patient in matched samples or between tumor and normal samples of tissue from different patients in unmatched samples. During initial analysis of the microarrays, the hypothesis was accepted if p>10⁻³, and the differential ratio was set to 1.000 for those spots. All other spots have a significant difference in expression between the tumor and normal sample. If the tumor sample has detectable expression and the normal does not, the ratio is truncated at 1000 since the value for expression in the normal sample would be zero, and the ratio would not be a mathematically useful value (e.g., infinity). If the normal sample has detectable expression and the tumor does not, the ratio is truncated to 0.001, since the value for expression in the tumor sample would be zero and the ratio would not be a mathematically useful value. These latter two situations are referred to herein as “on/off.” Database tables were populated using a 95% confidence level (p>0.05).

[0471] Table 22 (inserted prior to claims) provides the results for gene products expressed by at least 2-fold or greater in cancerous prostate, colon, or breast tissue samples relative to normal tissue samples in at least 20% of the patients tested. Table 22 includes: 1) the SEQ ID NO (“SEQ ID”) assigned to each sequence for use in the present specification; 2) the sequence name (“SEQ NAME”) used as an internal identifier of the sequence; 3) the name assigned to the clone from which the sequence was isolated (“CLONE ID”); 4) the percentage of patients tested in which expression levels (e.g., as message level) of the gene was at least 2-fold greater in cancerous breast tissue than in matched normal tissue (“BREAST PATIENTS >=2×”); 5) the breast number ratios, indicating the number of patients upon which the provided ratio using matched breast tissue was based (“BREAST NUM RATIOS”); 6) the percentage of patients tested in which expression levels (e.g., as message level) of the gene was at least 2-fold greater in cancerous colon tissue than in matched normal tissue (“COLON PATIENTS >=2×”); 7) the colon number ratios, indicating the number of patients upon which the provided ratio using matched colon tissue was based (“COLON NUM RATIOS”); 8) the percentage of patients tested in which expression levels (e.g., as message level) of the gene was at least 2-fold greater in cancerous colon tissue than in unmatched normal tissue (“COLON UM>=2×”); 9) the unmatched colon number ratios, indicating the number of patients upon which the provided ratio using unmatched colon tissue was based (“COLON UM NUM RATIOS”).

TABLE 22

| | | | | | | | | COLON |
|---|---|---|---|---|---|---|---|---|
| | | | BREAST | BREAST | COLON | COLON | | UM |
| SEQ | | | PATIENTS | NUM | PATIENTS | NUM | COLON | NUM |
| ID | SEQ NAME | CLONE ID | >=2x | RATIOS | >=2x | RATIOS | UM >=2x | RATIOS |
| 189 | 3544.G06.GZ43_505397 | M00084443A:E10 | | | 50 | 8 | | |
| 420 | 3559.B18.GZ43_507504 | M00084700A:C10 | | | 41.025641 | 39 | 33.33333 | 27 |
| 754 | 3590.D19.GZ43_512389 | M00085031B:E03 | | | 37.5 | 8 | | |
| 816 | 3596.P03.GZ43_512529 | M00085171D:F05 | | | 70 | 40 | 60.71429 | 28 |
| 839 | 3599.K02.GZ43_512892 | M00085222D:D07 | | | 70 | 40 | 60.71429 | 28 |
| 1192 | 3665.O06.gz43_521001 | M00086277B:E06 | | | 57.5 | 40 | 50 | 12 |
| 1283 | 3756.K15.gz43_533455 | M00085835B:E11 | | | 35.2941176 | 34 | 35.71429 | 28 |
| 1289 | 3756.M06.gz43_533313 | M00085815C:E11 | 47.0588235 | 17 | | | | |
| 1320 | 3759.P15.gz43_533844 | M00085100B:C12 | | | 63.4146341 | 41 | | |
| 1549 | NT_007592S2.3_10 | | 50 | 10 | | | | |
| 1560 | NT_009296S1.3_1 | | | | | | 42.9 | 28 |
| 1560 | NT_009296S1.3_1 | | | | 46.2 | 39 | 33.3 | 27 |
| 1560 | NT_009296S1.3_1 | | | | 48.7 | 39 | 44.4 | 27 |
| 1577 | NT_017582S2.3_6 | | | | 61.5 | 39 | 55.6 | 27 |
| 1577 | NT_017582S2.3_6 | | | | 61.5 | 39 | 55.6 | 27 |

[0472] Table 25 (inserted prior to claims) provides the results for other gene products expressed by at least 2-fold or greater in cancerous prostate, colon, or breast tissue sample, which may be metastasized cancer samples, relative to normal tissue samples in at least 20% of the patients tested. For each set of data (i.e., the percentage of patients in which a particular sequence is up-regulated in a cancer tissue) the number of patients (Colon Cancer Patients; Colon Unmatched Met Patients and Colon Match Met Patients) is shown. If a sample is matched, it is matched to a sample from the same patient, if a sample is unmatched, the results obtained from that sample are compared to a pooled sample of an appropriate tissue type from the patients. If a sample is not from a metastasized tissue, it is from a primary tumor.

TABLE 25

| | | | Breast | | Colon | | Prostate |
|---|---|---|---|---|---|---|---|
| | | | Cancer | | Cancer | | Cancer |
| | | | Tumor/ | Breast | Tumor/ | Colon | Tumor/ |
| SEQ | | | Normal | Cancer | Normal | Cancer | Normal |
| ID | Seq Name | SpotID | >=2x | Patients | >=2x | Patients | >=2x |
| 138 | 3541.A16.GZ43_505167 | 58648 | | 23 | 26.09 | | |
| 151 | 3538.K12.GZ43_504729 | 56775 | | 23 | 26.00 | | |
| 181 | 3544.A17.GZ43_505567 | 56939 | | | | | |
| 205 | 3544.L13.GZ43_505514 | 60100 | | | | | 31.96 |
| 262 | 3550.D16.GZ43_506322 | 42108 | | | 44.74 | 76 | |
| 324 | 3553.J14.GZ43_506680 | 60233 | | | 47.37 | 19 | 37.11 |
| 331 | 3553.K03.GZ43_506505 | 55773 | 26.09 | 23 | 21.05 | 19 | 22.45 |
| 374 | 3556.C15.GZ43_507073 | 60100 | | | | | 31.96 |
| 392 | 3556.J14.GZ43_507064 | 60233 | | | 47.37 | 19 | 37.11 |
| 402 | 3556.M02.GZ43_506875 | 42108 | | | 44.74 | 76 | |
| 408 | 3556.N06.GZ43_506940 | 58440 | | | | | 20.41 |
| 467 | 3562.I02.GZ43_507639 | 58075 | | | | | 21.43 |
| 599 | 3574.F10.GZ43_509318 | 58075 | | | | | 21.43 |
| 603 | 3574.G11.GZ43_509335 | 56782 | 21.74 | 23 | | | |
| 605 | 3574.I02.GZ43_509193 | 60100 | | | | | 31.96 |
| 754 | 3590.D19.GZ43_512389 | 60100 | | | | | 31.96 |
| 768 | 3590.J01.GZ43_512107 | 60100 | | | | | 31.96 |
| 777 | 3590.L10.GZ43_512253 | 60100 | | | | | 31.96 |
| 792 | 3596.E08.GZ43_512598 | 60100 | | | | | 31.96 |
| 804 | 3596.K14.GZ43_512700 | 60100 | | | | | 31.96 |
| 814 | 3596.O10.GZ43_512640 | 60100 | | | | | 31.96 |
| 818 | 3596.P07.GZ43_512593 | 60100 | | | | | 31.96 |
| 841 | 3599.K23.GZ43_513228 | 57429 | | | | | 34.69 |
| 841 | 3599.K23.GZ43_513228 | 60100 | | | | | 31.96 |
| 846 | 3599.M24.GZ43_513246 | 35065 | | | 24.00 | 75 | |
| 851 | 3599.O06.GZ43_512960 | 60100 | | | | | 31.96 |
| 854 | 3602.A09.GZ43_513378 | 60100 | | | | | 31.96 |
| 873 | 3602.K06.GZ43_513340 | 60100 | | | | | 31.96 |
| 883 | 3605.I19.gz43_513930 | 56753 | | | | | 20.41 |
| 923 | 3611.I04.gz43_514458 | 60100 | | | | | 31.96 |
| 931 | 3611.L22.gz43_514749 | 60100 | | | | | 31.96 |
| 953 | 3614.P11.gz43_514961 | 56775 | 26.09 | 23 | | | |
| 955 | 3617.B16.gz43_515411 | 1368 | | | 34.29 | 35 | |
| 955 | 3617.B16.gz43_515411 | 25873 | | | 50.00 | 76 | |
| 955 | 3617.B16.gz43_515411 | 26658 | | | 59.21 | 76 | |
| 958 | 3617.H16.gz43_515417 | 59904 | | | | | 25.77 |
| 959 | 3617.I01.gz43_515178 | 57008 | | | | | 23.47 |
| 966 | 3617.N14.gz43_515391 | 57651 | | | | | 21.43 |
| 968 | 3617.P11.gz43_515345 | 56753 | | | | | 20.41 |
| 969 | 3617.P12.gz43_515361 | 60100 | | | | | 31.96 |
| 971 | 3620.B03.gz43_515810 | 57651 | | | | | 21.43 |
| 979 | 3620.G17.gz43_516039 | 60100 | | | | | 31.96 |
| 999 | 3623.N23.gz43_516526 | 27078 | | | 28.95 | 76 | |
| 1005 | 3626.G01.gz43_516551 | 33958 | 39.13 | 23 | | | 24.51 |
| 1005 | 3626.G01.gz43_516551 | 35113 | 39.13 | 23 | | | 23.53 |
| 1005 | 3626.G01.gz43_516551 | 58921 | 30.43 | 23 | | | 22.45 |
| 1009 | 3626.M15.gz43_516781 | 59829 | 26.09 | 23 | 36.84 | 19 | |
| 1030 | 3632.G01.gz43_517319 | 25933 | | | | | 39.22 |
| 1032 | 3632.K20.gz43_517627 | 60100 | | | | | 31.96 |
| 1034 | 3632.M13.gz43_517517 | 60100 | | | | | 31.96 |
| 1035 | 3632.M19.gz43_517613 | 57429 | | | | | 34.69 |
| 1035 | 3632.M19.gz43_517613 | 60100 | | | | | 31.96 |
| 1042 | 3635.A13.gz43_517889 | 60100 | | | | | 31.96 |
| 1063 | 3638.L10.gz43_518236 | 60100 | | | | | 31.96 |
| 1074 | 3643.I24.gz43_518841 | 59904 | | | | | 25.77 |
| 1117 | 3661.K22.gz43_519717 | 56753 | | | | | 20.41 |
| 1176 | 3664.K19.gz43_520821 | 25933 | | | | | 39.22 |
| 1179 | 3664.P12.gz43_520714 | 57008 | | | | | 23.47 |
| 1179 | 3664.P12.gz43_520714 | 57797 | | | | | 21.43 |
| 1214 | 3666.L23.gz43_521654 | 53114 | | | | | 26.47 |
| 1224 | 3754.B08.gz43_532950 | 60100 | | | | | 31.96 |
| 1257 | 3756.A02.gz43_533237 | 60100 | | | | | 31.96 |
| 1266 | 3756.C16.gz43_533463 | 60100 | | | | | 31.96 |
| 1272 | 3756.E12.gz43_533401 | 57651 | | | | | 21.43 |
| 1278 | 3756.G14.gz43_533435 | 60100 | | | | | 31.96 |
| 1306 | 3759.K05.gz43_533679 | 59904 | | | | | 25.77 |
| 1325 | 3762.A20.gz43_534293 | 60233 | | | 47.37 | 19 | 37.11 |
| 1348 | 3762.L18.gz43_534272 | 60100 | | | | | 31.96 |
| 1354 | Clu8293.con_1 | 60100 | | | | | 31.96 |
| 1372 | Clu403488.con_1 | 60100 | | | | | 31.96 |
| 1409 | Clu609914.con_1 | 24511 | | | | | |
| 1411 | Clu621702.con_1 | 35065 | | | 24.00 | 75 | |
| 1427 | Clu733840.con_1 | 24511 | | | | | |
| 1435 | Clu777670.con_1 | 60100 | | | | | 31.96 |
| 1441 | Clu854573.con_1 | 57429 | | | | | 34.69 |
| 1441 | Clu854573.con_1 | 60100 | | | | | 31.96 |
| 1459 | Clu1053799.con_1 | 58075 | | | | | 21.43 |
| 1465 | Clu1054813.con_1 | 60233 | | | 47.37 | 19 | 37.11 |
| 1471 | Clu1055326.con_1 | 25933 | | | | | 39.22 |
| 1492 | Clu1088930.con_1 | 27078 | | | 28.95 | 76 | |
| 1522 | Clu1224379.con_1 | 42108 | | | 44.74 | 76 | |
| 1541 | Clu1228277.con_1 | 60100 | | | | | 31.96 |
| 1546 | Clu1259069.con_2 | 25844 | | | | | 51.96 |
| 1546 | Clu1259069.con_2 | 28996 | | | | | 49.02 |
| 1549 | Clu1292262.con_1 | 56753 | | | | | 20.41 |
| 1554 | Clu1292436.con_1 | 59904 | | | | | 25.77 |
| 1573 | NTN_007592S2.3_10 | 53100 | | | 25.33 | 75 | |
| 1584 | NTN_009296S1.3_1 | 1368 | | | 34.29 | 35 | |
| 1584 | NTN_009296S1.3_1 | 25873 | | | 50.00 | 76 | |
| 1584 | NTN_009296S1.3_1 | 26658 | | | 59.21 | 76 | |
| 1585 | NTN_009296S3.3_2 | 56753 | | | | | 20.41 |
| 1600 | NTN_011512S51.3_3 | 35086 | | | 22.67 | 75 | |
| 1600 | NTN_011512S51.3_3 | 36824 | | | 21.33 | 75 | |
| 1601 | NTN_017582S2.3_6 | 26345 | | | 69.74 | 76 | |
| 1615 | NTN_025842S13.2_1 | 27078 | | | 28.95 | 76 | |

| | | | | | | Colon | |
|---|---|---|---|---|---|---|---|
| | | Colon | Colon | Colon | Colon | Matched | Colon |
| | Prostate | Unmatched | Unmatched | Matched | Matched | Met/ | Match |
| SEQ | Cancer | Met/Normal | Met | Met/Normal | Met | Tumor | Met |
| ID | Patients | >=2x | Patients | >=2x | Patients | >=2x | Patients |
| 138 | | | | | | | |
| 151 | | | | | | | |
| 181 | | | | | | 22.22 | 18 |
| 205 | 97 | | | | | | |
| 262 | | 63.64 | 33 | 52.78 | 36 | | |
| 324 | 97 | | | 41.18 | 17 | | |
| 331 | 98 | | | | | | |
| 374 | 97 | | | | | | |
| 392 | 97 | | | 41.18 | 17 | | |
| 402 | | 63.64 | 33 | 52.78 | 36 | | |
| 408 | 98 | | | | | | |
| 467 | 98 | | | | | | |
| 599 | 98 | | | | | | |
| 603 | | | | | | | |
| 605 | 97 | | | | | | |
| 754 | 97 | | | | | | |
| 768 | 97 | | | | | | |
| 777 | 97 | | | | | | |
| 792 | 97 | | | | | | |
| 804 | 97 | | | | | | |
| 814 | 97 | | | | | | |
| 818 | 97 | | | | | | |
| 841 | 98 | | | | | | |
| 841 | 97 | | | | | | |
| 846 | | 21.21 | 33 | | | | |
| 851 | 97 | | | | | | |
| 854 | 97 | | | | | | |
| 873 | 97 | | | | | | |
| 883 | 98 | | | | | | |
| 923 | 97 | | | | | | |
| 931 | 97 | | | | | | |
| 953 | | | | | | | |
| 955 | | 56.67 | 30 | 28.57 | 7 | | |
| 955 | | 57.58 | 33 | 55.56 | 36 | | |
| 955 | | 66.67 | 33 | 44.44 | 36 | | |
| 958 | 97 | | | | | | |
| 959 | 98 | | | | | | |
| 966 | 98 | | | | | | |
| 968 | 98 | | | | | | |
| 969 | 97 | | | | | | |
| 971 | 98 | | | | | | |
| 979 | 97 | | | | | | |
| 999 | | 15.15 | 33 | | | | |
| 1005 | 102 | 18.18 | 33 | | | | |
| 1005 | 102 | 15.15 | 33 | | | | |
| 1005 | 98 | | | | | | |
| 1009 | | | | 47.06 | 17 | | |
| 1030 | 102 | 0.00 | 33 | | | | |
| 1032 | 97 | | | | | | |
| 1034 | 97 | | | | | | |
| 1035 | 98 | | | | | | |
| 1035 | 97 | | | | | | |
| 1042 | 97 | | | | | | |
| 1063 | 97 | | | | | | |
| 1074 | 97 | | | | | | |
| 1117 | 98 | | | | | | |
| 1176 | 102 | 0.00 | 33 | | | | |
| 1179 | 98 | | | | | | |
| 1179 | 98 | | | | | | |
| 1214 | 102 | 0.00 | 33 | | | | |
| 1224 | 97 | | | | | | |
| 1257 | 97 | | | | | | |
| 1266 | 97 | | | | | | |
| 1272 | 98 | | | | | | |
| 1278 | 97 | | | | | | |
| 1306 | 97 | | | | | | |
| 1325 | 97 | | | 41.18 | 17 | | |
| 1348 | 97 | | | | | | |
| 1354 | 97 | | | | | | |
| 1372 | 97 | | | | | | |
| 1409 | | 24.24 | 33 | 26.09 | 23 | | |
| 1411 | | 21.21 | 33 | | | | |
| 1427 | | 24.24 | 33 | 26.09 | 23 | | |
| 1435 | 97 | | | | | | |
| 1441 | 98 | | | | | | |
| 1441 | 97 | | | | | | |
| 1459 | 98 | | | | | | |
| 1465 | 97 | | | 41.18 | 17 | | |
| 1471 | 102 | 0.00 | 33 | | | | |
| 1492 | | 15.15 | 33 | | | | |
| 1522 | | 63.64 | 33 | 52.78 | 36 | | |
| 1541 | 97 | | | | | | |
| 1546 | 102 | 0.00 | 33 | | | | |
| 1546 | 102 | 0.00 | 33 | | | | |
| 1549 | 98 | | | | | | |
| 1554 | 97 | | | | | | |
| 1573 | | 6.06 | 33 | 28.57 | 35 | | |
| 1584 | | 56.67 | 30 | 28.57 | 7 | | |
| 1584 | | 57.58 | 33 | 55.56 | 36 | | |
| 1584 | | 66.67 | 33 | 44.44 | 36 | | |
| 1585 | 98 | | | | | | |
| 1600 | | 9.09 | 33 | 25.00 | 36 | | |
| 1600 | | 12.12 | 33 | 33.33 | 36 | | |
| 1601 | | 78.79 | 33 | 66.67 | 36 | | |
| 1615 | | 15.15 | 33 | | | | |

[0473] These data provide evidence that the genes represented by the polynucleotides having the indicated sequences are differentially expressed in breast, prostate, cancer as compared to normal non-cancerous breast tissue and are differentially expressed in colon cancer as compared to normal non-cancerous colon tissue

[0474] The above methods can be performed to identify genes differentially expressed in cancerous and normal cells of any type of tissue, such as prostate, lung, colon, breast, and the like.

### Example 23

### Antisense Regulation of Gene Expression

[0475] The expression of the differentially expressed genes represented by the polynucleotides in the cancerous cells can be further analyzed using antisense knockout technology to confirm the role and function of the gene product in tumorigenesis, e.g., in promoting a metastatic phenotype.

[0476] Methods for analysis using antisense technology are well known in the art. For example, a number of different oligonucleotides complementary to the mRNA generated by the differentially expressed genes identified herein can be designed as antisense oligonucleotides, and tested for their ability to suppress expression of the genes. Sets of antisense oligomers specific to each candidate target are designed using the sequences of the polynucleotides corresponding to a differentially expressed gene and the software program HYBsimulator Version 4 (available for Windows 95/Windows NT or for Power Macintosh, RNAture, Inc. 1003 Health Sciences Road, West, Irvine, Calif. 92612 USA). Factors considered when designing antisense oligonucleotides include: 1) the The expression of the differentially expressed genes represented by the polynucleotides in the cancerous cells can be analyzed using antisense knockout technology to confirm the role and function of the gene product in tumorigenesis, e.g., in promoting a metastatic phenotype.

[0477] A number of different oligonucleotides complementary to the mRNA generated by the differentially expressed genes identified herein can be designed as potential antisense oligonucleotides, and tested for their ability to suppress expression of the genes. Sets of antisense oligomers specific to each candidate target are designed using the sequences of the polynucleotides corresponding to a differentially expressed gene and the software program HYBsimulator Version 4 (available for Windows 95/Windows NT or for Power Macintosh, RNAture, Inc. 1003 Health Sciences Road, West, Irvine, Calif. 92612 USA). Factors that are considered when designing antisense oligonucleotides include: 1) the secondary structure of oligonucleotides; 2) the secondary structure of the target gene; 3) the specificity with no or minimum cross-hybridization to other expressed genes; 4) stability; 5) length and 6) terminal GC content. The antisense oligonucleotide is designed so that it will hybridize to its target sequence under conditions of high stringency at physiological temperatures (e.g., an optimal temperature for the cells in culture to provide for hybridization in the cell, e.g., about 37° C.), but with minimal formation of homodimers.

[0478] Using the sets of oligomers and the HYBsimulator program, three to ten antisense oligonucleotides and their reverse controls are designed and synthesized for each candidate mRNA transcript, which transcript is obtained from the gene corresponding to the target polynucleotide sequence of interest. Once synthesized and quantitated, the oligomers are screened for efficiency of a transcript knock-out in a panel of cancer cell lines. The efficiency of the knock-out is determined by analyzing mRNA levels using lightcycler quantification. The oligomers that resulted in the highest level of transcript knock-out, wherein the level was at least about 50%, preferably about 80-90%, up to 95% or more up to undetectable message, are selected for use in a cell-based proliferation assay, an anchorage independent growth assay, and an apoptosis assay.

[0479] The ability of each designed antisense oligonucleotide to inhibit gene expression is tested through transfection into LNCaP, PC3, 22Rv1, MDA-PCA-2b, or DU145 prostate carcinoma cells. For each transfection mixture, a carrier molecule (such as a lipid, lipid derivative, lipid-like molecule, cholesterol, cholesterol derivative, or cholesterol-like molecule) is prepared to a working concentration of 0.5 mM in water, sonicated to yield a uniform solution, and filtered through a 0.45 μm PVDF membrane. The antisense or control oligonucleotide is then prepared to a working concentration of 100 μM in sterile Millipore water. The oligonucleotide is further diluted in OptiMEM™ (Gibco/BRL), in a microfuge tube, to 2 μM, or approximately 20 μg oligo/ml of OptiMEM™. In a separate microfuge tube, the carrier molecule, typically in the amount of about 1.5-2 nmol carrier/μg antisense oligonucleotide, is diluted into the same volume of OptiMEM™ used to dilute the oligonucleotide. The diluted antisense oligonucleotide is immediately added to the diluted carrier and mixed by pipetting up and down. Oligonucleotide is added to the cells to a final concentration of 30 nM.

[0480] The level of target mRNA that corresponds to a target gene of interest in the transfected cells is quantitated in the cancer cell lines using the Roche LightCycler™ real-time PCR machine. Values for the target mRNA are normalized versus an internal control (e.g., beta-actin). For each 20 μl reaction, extracted RNA (generally 0.2-1 μg total) is placed into a sterile 0.5 or 1.5 ml microcentrifuge tube, and water is added to a total volume of 12.5 μl. To each tube is added 7.5 μl of a buffer/enzyme mixture, prepared by mixing (in the order listed) 2.5 μl H₂O, 2.0 μl 10× reaction buffer, 10 μl oligo dT (20 pmol), 1.0 μl dNTP mix (10 mM each), 0.5 μl RNAsin® (20 u) (Ambion, Inc., Hialeah, Fla.), and 0.5 μl MMLV reverse transcriptase (50 u) (Ambion, Inc.). The contents are mixed by pipetting up and down, and the reaction mixture is incubated at 42° C. for 1 hour. The contents of each tube are centrifuged prior to amplification.

[0481] An amplification mixture is prepared by mixing in the following order: 1× PCR buffer 11, 3 mM MgCl₂, 140 μM each dNTP, 0.175 pmol each oligo, 1:50,000 dil of SYBR® Green, 0.25 mg/ml BSA, 1 unit Taq polymerase, and H₂₀ to 20 μl. (PCR buffer II is available in 10× concentration from Perkin-Elmer, Norwalk, Conn.). In 1× concentration it contains 10 mM Tris pH 8.3 and 50 mM KCl. SYBR® Green (Molecular Probes, Eugene, Oreg.) is a dye which fluoresces when bound to double stranded DNA. As double stranded PCR product is produced during amplification, the fluorescence from SYBR® Green increases. To each 20 μl aliquot of amplification mixture, 2 μl of template RT is added, and amplification is carried out according to standard protocols. The results are expressed as the percent decrease in expression of the corresponding gene product relative to non-transfected cells, vehicle-only transfected (mock-transfected) cells, or cells transfected with reverse control oligonucleotides.

### Example 24

### Effect of Expression on Proliferation

[0482] The effect of gene expression on the inhibition of cell proliferation can be assessed in metastatic breast cancer cell lines (MDA-MB-231 (“231”)); SW620 colon colorectal carcinoma cells; SKOV3 cells (a human ovarian carcinoma cell line); or LNCaP, PC3, 22Rv1, MDA-PCA-2b, or DU145 prostate cancer cells.

[0483] Cells are plated to approximately 60-80% confluency in 96-well dishes. Antisense or reverse control oligonucleotide is diluted to 2 μM in OptiMEM™. The oligonucleotide-OptiMEM™ can then be added to a delivery vehicle, which delivery vehicle can be selected so as to be optimized for the particular cell type to be used in the assay. The oligo/delivery vehicle mixture is then further diluted into medium with serum on the cells. The final concentration of oligonucleotide for all experiments can be about 300 nM.

[0484] Antisense oligonucleotides are prepared as described above (see Example 3). Cells are transfected overnight at 37° C. and the transfection mixture is replaced with fresh medium the next morning. Transfection is carried out as described above in Example 23.

[0485] Those antisense oligonucleotides that result in inhibition of proliferation of SW620 cells indicate that the corresponding gene plays a role in production or maintenance of the cancerous phenotype in cancerous colon cells. Those antisense oligonucleotides that inhibit proliferation in SKOV3 cells represent genes that play a role in production or maintenance of the cancerous phenotype in cancerous breast cells. Those antisense oligonucleotides that result in inhibition of proliferation of MDA-MB-231 cells indicate that the corresponding gene plays a role in production or maintenance of the cancerous phenotype in cancerous ovarian cells. Those antisense oligonucleotides that inhibit proliferation in LNCaP, PC3, 22Rv1, MDA-PCA-2b, or DU145 cells represent genes that play a role in production or maintenance of the cancerous phenotype in cancerous prostate cells.

[0486] Using the following antisense oligonucleotides: TTGGTTCCCAAGACAAGCCGTGAC (SEQ ID NO:1676); TCTCAACGCTACCAGGCACTCCTTG (SEQ ID NO:1677); GCACAGCCCAAAGTCAAAGGCATTA (SEQ ID NO:1678); CAGGCACTCCTTGGTCAAATGTGGG (SEQ ID NO:1679); GGACAGGGAAAGGAGAGGCTAGTCA (SEQ ID NO:1680) and TGCATTCTCTCCCACATCTCAACGC SEQ ID NO:1681, corresponding to a glutothione transferase omega identified by SEQ ID NOS: 1510 and 1674 (Chiron Candidate Id 21), were used to inhibit proliferation of SW620 colon colorectal carcinoma cells. These antisense molecules reduced glutothione transferase omega RNA expression by approximately 90%.

### Example 25

### Effect of Gene Expression on Cell Migration

[0487] The effect of gene expression on the inhibition of cell migration can be assessed in LNCaP, PC3, 22Rv1, MDA-PCA-2b, or DU145 prostate cancer cells using static endothelial cell binding assays, non-static endothelial cell binding assays, and transmigration assays.

[0488] For the static endothelial cell binding assay, antisense oligonucleotides are prepared as described above (see Example 23). Two days prior to use, prostate cancer cells (CaP) are plated and transfected with antisense oligonucleotide as described above (see above). On the day before use, the medium is replaced with fresh medium, and on the day of use, the medium is replaced with fresh medium containing 2 μM CellTracker green CMFDA (Molecular Probes, Inc.) and cells are incubated for 30 min. Following incubation, CaP medium is replaced with fresh medium (no CMFDA) and cells are incubated for an additional 30-60 min. CaP cells are detached using CMF PBS/2.5 mM EDTA or trypsin, spun and resuspended in DMEM/1% BSA/10 mM HEPES pH 7.0. Finally, CaP cells are counted and resuspended at a concentration of 1×10⁶ cells/ml.

[0489] Endothelial cells (EC) are plated onto 96-well plates at 40-50% confluence 3 days prior to use. On the day of use, EC are washed 1× with PBS and 50λ DMDM/1% BSA/10 mM HEPES pH 7 is added to each well. To each well is then added 50K (50λ) CaP cells in DMEM/1% BSA/10 mM HEPES pH 7. The plates are incubated for an additional 30 min and washed 5× with PBS containing Ca⁺⁺ and Mg⁺⁺. After the final wash, 100 μL PBS is added to each well and fluorescence is read on a fluorescent plate reader (Ab492/Em 516 nm).

[0490] For the non-static endothelial cell binding assay, CaP are prepared as described above. EC are plated onto 24-well plates at 30-40% confluence 3 days prior to use. On the day of use, a subset of EC are treated with cytokine for 6 hours then washed 2× with PBS. To each well is then added 150-200K CaP cells in DMEM/1% BSA/10 mM HEPES pH 7. Plates are placed on a rotating shaker (70 RPM) for 30 min and then washed 3× with PBS containing Ca⁺⁺ and Mg⁺⁺. After the final wash, 500 μL PBS is added to each well and fluorescence is read on a fluorescent plate reader (Ab492/Em 516 nm).

[0491] For the transmigration assay, CaP are prepared as described above with the following changes. On the day of use, CaP medium is replaced with fresh medium containing 5 μM CellTracker green CMFDA (Molecular Probes, Inc.) and cells are incubated for 30 min. Following incubation, CaP medium is replaced with fresh medium (no CMFDA) and cells are incubated for an additional 30-60 min. CaP cells are detached using CMF PBS/2.5 mM EDTA or trypsin, spun and resuspended in EGM-2-MV medium. Finally, CaP cells are counted and resuspended at a concentration of 1×10⁶ cells/ml.

[0492] EC are plated onto FluorBlok transwells (BD Biosciences) at 30-40% confluence 5-7 days before use. Medium is replaced with fresh medium 3 days before use and on the day of use. To each transwell is then added 50K labeled CaP. 30 min prior to the first fluorescence reading, 10 μg of FITC-dextran (10K MW) is added to the EC plated filter. Fluorescence is then read at multiple time points on a fluorescent plate reader (Ab492/Em 516 nm).

[0493] Those antisense oligonucleotides that result in inhibition of binding of LNCaP, PC3, 22Rv1, MDA-PCA-2b, or DU145 prostate cancer cells to endothelial cells indicate that the corresponding gene plays a role in the production or maintenance of the cancerous phenotype in cancerous prostate cells. Those antisense oligonucleotides that result in inhibition of endothelial cell transmigration by LNCaP, PC3, 22Rv1, MDA-PCA-2b, or DU145 prostate cancer cells indicate that the corresponding gene plays a role in the production or maintenance of the cancerous phenotype in cancerous prostate cells.

### Example 26

### Effect of Gene Expression on Colony Formation

[0494] The effect of gene expression upon colony formation of SW620 cells, SKOV3 cells, MD-MBA-231 cells, LNCaP cells, PC3 cells, 22Rv1 cells, MDA-PCA-2b cells, and DU145 cells can be tested in a soft agar assay. Soft agar assays are conducted by first establishing a bottom layer of 2 ml of 0.6% agar in media plated fresh within a few hours of layering on the cells. The cell layer is formed on the bottom layer by removing cells transfected as described above from plates using 0.05% trypsin and washing twice in media. The cells are counted in a Coulter counter, and resuspended to 10⁶ per ml in media. 10 μl aliquots are placed with media in 96-well plates (to check counting with WST1), or diluted further for the soft agar assay. 2000 cells are plated in 800 μl 0.4% agar in duplicate wells above 0.6% agar bottom layer. After the cell layer agar solidifies, 2 ml of media is dribbled on top and antisense or reverse control oligo (produced as described in above) is added without delivery vehicles. Fresh media and oligos are added every 3-4 days. Colonies form in 10 days to 3 weeks. Fields of colonies are counted by eye. Wst-1 metabolism values can be used to compensate for small differences in starting cell number. Larger fields can be scanned for visual record of differences.

[0495] Those antisense oligonucleotides that result in inhibition of colony formation of SW620 cells indicate that the corresponding gene plays a role in production or maintenance of the cancerous phenotype in cancerous colon cells. Those antisense oligonucleotides that inhibit colony formation in SKOV3 cells represent genes that play a role in production or maintenance of the cancerous phenotype in cancerous breast cells. Those antisense oligonucleotides that result in inhibition of colony formation of MDA-MB-231 cells indicate that the corresponding gene plays a role in production or maintenance of the cancerous phenotype in cancerous ovarian cells. Those antisense oligonucleotides that inhibit colony formation in LNCaP, PC3, 22Rv1, MDA-PCA-2b, or DU145 cells represent genes that play a role in production or maintenance of the cancerous phenotype in cancerous prostate cells.

### Example 27

### Induction of Cell Death Upon Depletion of Polypeptides by Depletion of mRNA (“Antisense Knockout”)

[0496] In order to assess the effect of depletion of a target message upon cell death, LNCaP, PC3, 22Rv1, MDA-PCA-2b, or DU145 cells, or other cells derived from a cancer of interest, can be transfected for proliferation assays. For cytotoxic effect in the presence of cisplatin (cis), the same protocol is followed but cells are left in the presence of 2 μM drug. Each day, cytotoxicity is monitored by measuring the amount of LDH enzyme released in the medium due to membrane damage. The activity of LDH is measured using the Cytotoxicity Detection Kit from Roche Molecular Biochemicals. The data is provided as a ratio of LDH released in the medium vs. the total LDH present in the well at the same time point and treatment (rLDH/tLDH). A positive control using antisense and reverse control oligonucleotides for BCL2 (a known anti-apoptotic gene) is included; loss of message for BCL2 leads to an increase in cell death compared with treatment with the control oligonucleotide (background cytotoxicity due to transfection).

### Example 28

### Functional Analysis of Gene Products Differentially Expressed in Cancer

[0497] The gene products of sequences of a gene differentially expressed in cancerous cells can be further analyzed to confirm the role and function of the gene product in tumorigenesis, e.g., in promoting or inhibiting development of a metastatic phenotype. For example, the function of gene products corresponding to genes identified herein can be assessed by blocking function of the gene products in the cell. For example, where the gene product is secreted or associated with a cell surface membrane, blocking antibodies can be generated and added to cells to examine the effect upon the cell phenotype in the context of, for example, the transformation of the cell to a cancerous, particularly a metastatic, phenotype. In order to generate antibodies, a clone corresponding to a selected gene product is selected, and a sequence that represents a partial or complete coding sequence is obtained. The resulting clone is expressed, the polypeptide produced isolated, and antibodies generated. The antibodies are then combined with cells and the effect upon tumorigenesis assessed.

[0498] Where the gene product of the differentially expressed genes identified herein exhibits sequence homology to a protein of known function (e.g., to a specific kinase or protease) and/or to a protein family of known function (e.g., contains a domain or other consensus sequence present in a protease family or in a kinase family), then the role of the gene product in tumorigenesis, as well as the activity of the gene product, can be examined using small molecules that inhibit or enhance function of the corresponding protein or protein family.

[0499] Additional functional assays include, but are not necessarily limited to, those that analyze the effect of expression of the corresponding gene upon cell cycle and cell migration. Methods for performing such assays are well known in the art.

### Example 29

### Deposit Information

[0500] Deposits of the biological materials in the tables referenced below were made with either the Agricultural Research Service Culture Collection (NRRL), 1815 North University Street, Peoria, Ill. 61604, or with the American Type Culture Collection (ATCC), 10801 University Blvd., Manasas, Va. 20110-2209, under the provisions of the Budapest Treaty, on or before the filing date of the present application. The accession number indicated is assigned after successful viability testing, and the requisite fees were paid. Access to said cultures will be available during pendency of the patent application to one determined by the Commissioner to be entitled to such under 37 C.F.R. § 1.14 and 35 U.S.C. §122. All restriction on availability of said cultures to the public will be irrevocably removed upon the granting of a patent based upon the application. Moreover, the designated deposits will be maintained for a period of thirty (30) years from the date of deposit, or for five (5) years after the last request for the deposit; or for the enforceable life of the U.S. patent, whichever is longer. Should a culture become nonviable or be inadvertently destroyed, or, in the case of plasmid-containing strains, lose its plasmid, it will be replaced with a viable culture(s) of the same taxonomic description.

[0501] These deposits are provided merely as a convenience to those of skill in the art, and are not an admission that a deposit is required. A license may be required to make, use, or sell the deposited materials, and no such license is hereby granted. The deposit below was received by the ATCC on or before the filing date of the present application.

TABLE 23
Cell Lines Deposited with ATCC

| | | ATCC Accession | CMCC Accession |
|---|---|---|---|
| Cell Line | Deposit Date | No. | No. |
| KM12L4-A | Mar. 19, 1998 | CRL-12496 | 11606 |
| Km12C | May 15, 1998 | CRL-12533 | 11611 |
| MDA-MB- | May 15, 1998 | CRL-12532 | 10583 |
| 231 | | | |
| MCF-7 | Oct. 9, 1998 | CRL-12584 | 10377 |

[0502] In addition, pools of selected clones, as well as libraries containing specific clones, were assigned an “ES” number and a “CMCC” number (both internal references) and deposited with the NRRL. Table 24 provides the NRRL Accession Nos. of the clones deposited as librarires named ES219-ES225 (CMCC5471-CMCC5477, respectively) on Nov. 1, 2001, and of the clones deposited as a library named ES226 (CMCC5478) on Nov. 7, 2001.

TABLE 24

| Library | CMCC | | NRRL |
|---|---|---|---|
| ID | Number | CloneId | Number |
| ES219 | 5471 | M00084879B:E01 | B-30523 |
| ES219 | 5471 | M00083819B:E10 | B-30523 |
| ES219 | 5471 | M00084942C:B10 | B-30523 |
| ES219 | 5471 | M00084704C:B09 | B-30523 |
| ES219 | 5471 | M00084887C:C07 | B-30523 |
| ES219 | 5471 | M00084976B:A08 | B-30523 |
| ES219 | 5471 | M00085011B:A01 | B-30523 |
| ES219 | 5471 | M00084961A:C07 | B-30523 |
| ES219 | 5471 | M00084960D:D02 | B-30523 |
| ES219 | 5471 | M00084973A:B06 | B-30523 |
| ES219 | 5471 | M00084928D:F06 | B-30523 |
| ES219 | 5471 | M00084968C:D10 | B-30523 |
| ES219 | 5471 | M00084973A:B06 | B-30523 |
| ES219 | 5471 | M00084966A:A08 | B-30523 |
| ES219 | 5471 | M00084919C:B04 | B-30523 |
| ES219 | 5471 | M00085003C:D03 | B-30523 |
| ES219 | 5471 | M00084968A:D01 | B-30523 |
| ES219 | 5471 | M00084969D:C11 | B-30523 |
| ES219 | 5471 | M00084899D:B01 | B-30523 |
| ES219 | 5471 | M00084893C:A12 | B-30523 |
| ES219 | 5471 | M00084890D:F09 | B-30523 |
| ES219 | 5471 | M00084904A:D03 | B-30523 |
| ES219 | 5471 | M00085029A:C02 | B-30523 |
| ES219 | 5471 | M00084963D:D07 | B-30523 |
| ES219 | 5471 | M00085147C:A04 | B-30523 |
| ES219 | 5471 | M00085144B:C12 | B-30523 |
| ES219 | 5471 | M00085124B:G05 | B-30523 |
| ES219 | 5471 | M00085702B:G11 | B-30523 |
| ES219 | 5471 | M00085203A:E06 | B-30523 |
| ES219 | 5471 | M00085242A:C06 | B-30523 |
| ES219 | 5471 | M00084980D:H08 | B-30523 |
| ES219 | 5471 | M00085187B:C11 | B-30523 |
| ES219 | 5471 | M00085021C:F06 | B-30523 |
| ES219 | 5471 | M00085182B:E04 | B-30523 |
| ES219 | 5471 | M00084930D:B08 | B-30523 |
| ES219 | 5471 | M00084941B:E07 | B-30523 |
| ES219 | 5471 | M00084424D:G07 | B-30523 |
| ES219 | 5471 | M00084938B:F12 | B-30523 |
| ES219 | 5471 | M00084853D:G03 | B-30523 |
| ES219 | 5471 | M00084878B:B12 | B-30523 |
| ES219 | 5471 | M00084889B:C02 | B-30523 |
| ES219 | 5471 | M00084885D:A12 | B-30523 |
| ES219 | 5471 | M00084845A:E02 | B-30523 |
| ES219 | 5471 | M00084972B:H03 | B-30523 |
| ES219 | 5471 | M00084908A:F03 | B-30523 |
| ES219 | 5471 | M00084975A:G05 | B-30523 |
| ES219 | 5471 | M00084941C:H04 | B-30523 |
| ES219 | 5471 | M00084997D:H09 | B-30523 |
| ES219 | 5471 | M00084491A:E08 | B-30523 |
| ES219 | 5471 | M00083815C:H08 | B-30523 |
| ES219 | 5471 | M00084501A:D06 | B-30523 |
| ES219 | 5471 | M00084558D:G08 | B-30523 |
| ES219 | 5471 | M00084510C:F02 | B-30523 |
| ES219 | 5471 | M00084521C:H11 | B-30523 |
| ES219 | 5471 | M00084446A:A05 | B-30523 |
| ES219 | 5471 | M00084458A:G06 | B-30523 |
| ES219 | 5471 | M00084377D:E08 | B-30523 |
| ES219 | 5471 | M00084382A:D06 | B-30523 |
| ES219 | 5471 | M00083816B:D08 | B-30523 |
| ES219 | 5471 | M00084449B:C09 | B-30523 |
| ES219 | 5471 | M00084431C:B02 | B-30523 |
| ES219 | 5471 | M00084463A:B07 | B-30523 |
| ES219 | 5471 | M00084487D:F04 | B-30523 |
| ES219 | 5471 | M00083800C:E07 | B-30523 |
| ES219 | 5471 | M00084468C:E07 | B-30523 |
| ES219 | 5471 | M00084638A:E10 | B-30523 |
| ES219 | 5471 | M00084439B:A08 | B-30523 |
| ES219 | 5471 | M00084479D:E10 | B-30523 |
| ES219 | 5471 | M00084455D:B03 | B-30523 |
| ES219 | 5471 | M00084368D:C02 | B-30523 |
| ES219 | 5471 | M00084642D:E08 | B-30523 |
| ES219 | 5471 | M00084373A:F08 | B-30523 |
| ES219 | 5471 | M00084364C:B06 | B-30523 |
| ES219 | 5471 | M00084521B:E11 | B-30523 |
| ES219 | 5471 | M00084385B:D03 | B-30523 |
| ES219 | 5471 | M00084443C:H06 | B-30523 |
| ES219 | 5471 | M00083803C:F03 | B-30523 |
| ES219 | 5471 | M00084421C:B11 | B-30523 |
| ES219 | 5471 | M00084434B:E06 | B-30523 |
| ES219 | 5471 | M00083820B:C03 | B-30523 |
| ES219 | 5471 | M00084246B:H03 | B-30523 |
| ES219 | 5471 | M00084484C:B11 | B-30523 |
| ES219 | 5471 | M00084410C:F10 | B-30523 |
| ES219 | 5471 | M00083801B:H03 | B-30523 |
| ES219 | 5471 | M00084980C:B07 | B-30523 |
| ES219 | 5471 | M00084499C:C11 | B-30523 |
| ES219 | 5471 | M00084526C:G09 | B-30523 |
| ES219 | 5471 | M00084406C:A01 | B-30523 |
| ES219 | 5471 | M00084380D:B07 | B-30523 |
| ES219 | 5471 | M00084383B:A11 | B-30523 |
| ES219 | 5471 | M00083834C:E02 | B-30523 |
| ES219 | 5471 | M00083839A:H03 | B-30523 |
| ES219 | 5471 | M00084505C:H08 | B-30523 |
| ES219 | 5471 | M00084511D:A02 | B-30523 |
| ES219 | 5471 | M00084494C:C01 | B-30523 |
| ES219 | 5471 | M00084451D:F06 | B-30523 |
| ES219 | 5471 | M00084604A:D02 | B-30523 |
| ES219 | 5471 | M00084771D:G03 | B-30523 |
| ES219 | 5471 | M00084817A:H11 | B-30523 |
| ES219 | 5471 | M00084827D:D04 | B-30523 |
| ES219 | 5471 | M00084843D:C06 | B-30523 |
| ES219 | 5471 | M00084750C:B08 | B-30523 |
| ES219 | 5471 | M00084757A:D01 | B-30523 |
| ES219 | 5471 | M00084771D:A01 | B-30523 |
| ES219 | 5471 | M00084730B:A09 | B-30523 |
| ES219 | 5471 | M00084826B:E11 | B-30523 |
| ES219 | 5471 | M00084595C:C07 | B-30523 |
| ES219 | 5471 | M00084724A:C02 | B-30523 |
| ES219 | 5471 | M00084833A:G07 | B-30523 |
| ES219 | 5471 | M00084600D:B10 | B-30523 |
| ES219 | 5471 | M00084634C:H02 | B-30523 |
| ES219 | 5471 | M00084614D:A08 | B-30523 |
| ES219 | 5471 | M00084620B:F05 | B-30523 |
| ES219 | 5471 | M00084607A:B03 | B-30523 |
| ES219 | 5471 | M00084633A:B12 | B-30523 |
| ES219 | 5471 | M00084597A:F06 | B-30523 |
| ES219 | 5471 | M00084575A:A11 | B-30523 |
| ES219 | 5471 | M00084547B:B10 | B-30523 |
| ES219 | 5471 | M00084525A:E08 | B-30523 |
| ES219 | 5471 | M00084578B:E12 | B-30523 |
| ES219 | 5471 | M00084669A:A05 | B-30523 |
| ES219 | 5471 | M00084419C:A09 | B-30523 |
| ES219 | 5471 | M00084769C:H03 | B-30523 |
| ES219 | 5471 | M00085007A:B03 | B-30523 |
| ES219 | 5471 | M00084865D:B04 | B-30523 |
| ES219 | 5471 | M00084743D:G01 | B-30523 |
| ES219 | 5471 | M00084770B:G12 | B-30523 |
| ES219 | 5471 | M00084584B:A02 | B-30523 |
| ES219 | 5471 | M00084647C:E12 | B-30523 |
| ES219 | 5471 | M00084766D:F12 | B-30523 |
| ES219 | 5471 | M00084648D:F05 | B-30523 |
| ES219 | 5471 | M00084843A:D06 | B-30523 |
| ES219 | 5471 | M00084709C:B02 | B-30523 |
| ES219 | 5471 | M00084834B:G02 | B-30523 |
| ES219 | 5471 | M00084718D:C04 | B-30523 |
| ES219 | 5471 | M00084702B:C12 | B-30523 |
| ES219 | 5471 | M00084645D:G02 | B-30523 |
| ES219 | 5471 | M00084849B:F11 | B-30523 |
| ES219 | 5471 | M00084859C:H05 | B-30523 |
| ES219 | 5471 | M00084850D:H02 | B-30523 |
| ES219 | 5471 | M00084857B:A09 | B-30523 |
| ES219 | 5471 | M00084867A:C11 | B-30523 |
| ES219 | 5471 | M00084823A:H01 | B-30523 |
| ES219 | 5471 | M00084756B:H01 | B-30523 |
| ES219 | 5471 | M00084700D:E09 | B-30523 |
| ES219 | 5471 | M00085010C:H01 | B-30523 |
| ES219 | 5471 | M00085060B:C05 | B-30523 |
| ES219 | 5471 | M00085012C:A08 | B-30523 |
| ES219 | 5471 | M00085047D:F03 | B-30523 |
| ES219 | 5471 | M00085049B:E03 | B-30523 |
| ES219 | 5471 | M00085051C:A01 | B-30523 |
| ES219 | 5471 | M00085050A:E11 | B-30523 |
| ES219 | 5471 | M00085676C:C04 | B-30523 |
| ES219 | 5471 | M00085121A:D10 | B-30523 |
| ES219 | 5471 | M00085166D:C10 | B-30523 |
| ES219 | 5471 | M00084992D:B02 | B-30523 |
| ES219 | 5471 | M00085148B:H01 | B-30523 |
| ES219 | 5471 | M00085123B:C04 | B-30523 |
| ES219 | 5471 | M00085173B:A08 | B-30523 |
| ES219 | 5471 | M00085172C:F06 | B-30523 |
| ES219 | 5471 | M00084937D:B04 | B-30523 |
| ES219 | 5471 | M00085026D:A01 | B-30523 |
| ES219 | 5471 | M00084994D:F11 | B-30523 |
| ES219 | 5471 | M00085190C:D10 | B-30523 |
| ES219 | 5471 | M00085194D:F04 | B-30523 |
| ES219 | 5471 | M00085222D:D07 | B-30523 |
| ES219 | 5471 | M00085223A:G01 | B-30523 |
| ES219 | 5471 | M00084740C:B08 | B-30523 |
| ES219 | 5471 | M00085056A:G12 | B-30523 |
| ES219 | 5471 | M00084671A:C12 | B-30523 |
| ES219 | 5471 | M00084571C:D05 | B-30523 |
| ES219 | 5471 | M00084587B:H07 | B-30523 |
| ES219 | 5471 | M00084582C:H03 | B-30523 |
| ES219 | 5471 | M00084618C:A03 | B-30523 |
| ES219 | 5471 | M00084687A:A03 | B-30523 |
| ES219 | 5471 | M00085038A:C06 | B-30523 |
| ES219 | 5471 | M00084722A:H12 | B-30523 |
| ES219 | 5471 | M00084676B:E02 | B-30523 |
| ES219 | 5471 | M00084615D:H12 | B-30523 |
| ES219 | 5471 | M00084659C:G05 | B-30523 |
| ES219 | 5471 | M00084536B:A03 | B-30523 |
| ES219 | 5471 | M00084929C:B02 | B-30523 |
| ES219 | 5471 | M00084652D:G11 | B-30523 |
| ES219 | 5471 | M00084611B:A11 | B-30523 |
| ES219 | 5471 | M00084530D:G07 | B-30523 |
| ES219 | 5471 | M00084527C:H07 | B-30523 |
| ES219 | 5471 | M00084545C:C05 | B-30523 |
| ES219 | 5471 | M00084535D:C12 | B-30523 |
| ES219 | 5471 | M00084684C:D02 | B-30523 |
| ES219 | 5471 | M00084679D:G12 | B-30523 |
| ES219 | 5471 | M00084734A:E04 | B-30523 |
| ES219 | 5471 | M00084696D:H04 | B-30523 |
| ES220 | 5472 | M00084724D:F04 | B-30524 |
| ES220 | 5472 | M00084559B:F10 | B-30524 |
| ES220 | 5472 | M00084707D:H03 | B-30524 |
| ES220 | 5472 | M00084525D:H01 | B-30524 |
| ES220 | 5472 | M00084578C:G09 | B-30524 |
| ES220 | 5472 | M00084710B:G07 | B-30524 |
| ES220 | 5472 | M00084537B:C05 | B-30524 |
| ES220 | 5472 | M00084560A:G08 | B-30524 |
| ES220 | 5472 | M00085129B:C02 | B-30524 |
| ES220 | 5472 | M00084620D:E05 | B-30524 |
| ES220 | 5472 | M00084576A:E12 | B-30524 |
| ES220 | 5472 | M00084720A:A01 | B-30524 |
| ES220 | 5472 | M00084654A:E04 | B-30524 |
| ES220 | 5472 | M00084596D:E10 | B-30524 |
| ES220 | 5472 | M00084646A:D02 | B-30524 |
| ES220 | 5472 | M00084572D:F07 | B-30524 |
| ES220 | 5472 | M00084620A:E08 | B-30524 |
| ES220 | 5472 | M00084553B:F04 | B-30524 |
| ES220 | 5472 | M00084614D:B07 | B-30524 |
| ES220 | 5472 | M00084604D:D08 | B-30524 |
| ES220 | 5472 | M00084722D:A03 | B-30524 |
| ES220 | 5472 | M00084958C:B03 | B-30524 |
| ES220 | 5472 | M00084523C:A05 | B-30524 |
| ES220 | 5472 | M00085166C:A08 | B-30524 |
| ES220 | 5472 | M00084467A:D06 | B-30524 |
| ES220 | 5472 | M00084890C:A06 | B-30524 |
| ES220 | 5472 | M00084609C:F10 | B-30524 |
| ES220 | 5472 | M00084413C:A11 | B-30524 |
| ES220 | 5472 | M00084834A:A03 | B-30524 |
| ES220 | 5472 | M00085172A:G05 | B-30524 |
| ES220 | 5472 | M00085146B:C01 | B-30524 |
| ES220 | 5472 | M00085038A:B10 | B-30524 |
| ES220 | 5472 | M00084246A:D03 | B-30524 |
| ES220 | 5472 | M00084967B:D09 | B-30524 |
| ES220 | 5472 | M00085035D:E04 | B-30524 |
| ES220 | 5472 | M00084736B:H03 | B-30524 |
| ES220 | 5472 | M00085025A:D11 | B-30524 |
| ES220 | 5472 | M00084900C:A04 | B-30524 |
| ES220 | 5472 | M00085127C:C03 | B-30524 |
| ES220 | 5472 | M00084424A:G07 | B-30524 |
| ES220 | 5472 | M00085131D:A06 | B-30524 |
| ES220 | 5472 | M00084987B:H12 | B-30524 |
| ES220 | 5472 | M00084967C:D10 | B-30524 |
| ES220 | 5472 | M00084420A:G02 | B-30524 |
| ES220 | 5472 | M00084452B:F07 | B-30524 |
| ES220 | 5472 | M00084705C:D01 | B-30524 |
| ES220 | 5472 | M00085156A:G04 | B-30524 |
| ES220 | 5472 | M00084447D:F03 | B-30524 |
| ES220 | 5472 | M00084495B:C11 | B-30524 |
| ES220 | 5472 | M00084745A:A08 | B-30524 |
| ES220 | 5472 | M00084458B:G05 | B-30524 |
| ES220 | 5472 | M00084449C:C01 | B-30524 |
| ES220 | 5472 | M00084867B:A03 | B-30524 |
| ES220 | 5472 | M00084680A:F08 | B-30524 |
| ES220 | 5472 | M00084585B:D06 | B-30524 |
| ES220 | 5472 | M00084835D:H03 | B-30524 |
| ES220 | 5472 | M00084685C:B12 | B-30524 |
| ES220 | 5472 | M00084500C:D01 | B-30524 |
| ES220 | 5472 | M00084469A:C09 | B-30524 |
| ES220 | 5472 | M00084381C:A05 | B-30524 |
| ES220 | 5472 | M00084477C:C07 | B-30524 |
| ES220 | 5472 | M00084647C:A05 | B-30524 |
| ES220 | 5472 | M00084687C:F12 | B-30524 |
| ES220 | 5472 | M00084756C:H01 | B-30524 |
| ES220 | 5472 | M00084565D:F08 | B-30524 |
| ES220 | 5472 | M00084560B:F12 | B-30524 |
| ES220 | 5472 | M00084640D:A08 | B-30524 |
| ES220 | 5472 | M00084443A:E10 | B-30524 |
| ES220 | 5472 | M00084521A:E11 | B-30524 |
| ES220 | 5472 | M00085019C:D05 | B-30524 |
| ES220 | 5472 | M00084587C:A07 | B-30524 |
| ES220 | 5472 | M00084616A:G03 | B-30524 |
| ES220 | 5472 | M00084732B:A04 | B-30524 |
| ES220 | 5472 | M00084666A:C04 | B-30524 |
| ES220 | 5472 | M00084633A:H05 | B-30524 |
| ES220 | 5472 | M00084510C:F05 | B-30524 |
| ES220 | 5472 | M00084648B:F06 | B-30524 |
| ES220 | 5472 | M00084700D:H04 | B-30524 |
| ES220 | 5472 | M00084506C:A05 | B-30524 |
| ES220 | 5472 | M00084475C:G11 | B-30524 |
| ES220 | 5472 | M00084673B:H11 | B-30524 |
| ES220 | 5472 | M00084595D:D08 | B-30524 |
| ES220 | 5472 | M00084636C:A06 | B-30524 |
| ES220 | 5472 | M00084612C:B01 | B-30524 |
| ES220 | 5472 | M00084644A:H05 | B-30524 |
| ES220 | 5472 | M00084602D:B09 | B-30524 |
| ES220 | 5472 | M00084584B:G07 | B-30524 |
| ES220 | 5472 | M00084678C:C11 | B-30524 |
| ES220 | 5472 | M00084546C:C06 | B-30524 |
| ES220 | 5472 | M00084755A:D02 | B-30524 |
| ES220 | 5472 | M00084536D:F07 | B-30524 |
| ES220 | 5472 | M00084699A:G05 | B-30524 |
| ES220 | 5472 | M00084438D:H04 | B-30524 |
| ES220 | 5472 | M00084766B:F02 | B-30524 |
| ES220 | 5472 | M00084703B:D09 | B-30524 |
| ES220 | 5472 | M00084856B:D03 | B-30524 |
| ES220 | 5472 | M00084857A:G05 | B-30524 |
| ES220 | 5472 | M00084868B:D01 | B-30524 |
| ES220 | 5472 | M00084823D:E05 | B-30524 |
| ES220 | 5472 | M00084485C:B04 | B-30524 |
| ES220 | 5472 | M00084910D:E07 | B-30524 |
| ES220 | 5472 | M00084996B:D08 | B-30524 |
| ES220 | 5472 | M00084487D:F07 | B-30524 |
| ES220 | 5472 | M00084824C:C10 | B-30524 |
| ES220 | 5472 | M00084949B:B12 | B-30524 |
| ES220 | 5472 | M00084746B:B04 | B-30524 |
| ES220 | 5472 | M00084944D:E05 | B-30524 |
| ES220 | 5472 | M00084851C:F10 | B-30524 |
| ES220 | 5472 | M00084849A:H08 | B-30524 |
| ES220 | 5472 | M00084843A:G01 | B-30524 |
| ES220 | 5472 | M00084921C:E04 | B-30524 |
| ES220 | 5472 | M00084742A:F07 | B-30524 |
| ES220 | 5472 | M00083799D:F10 | B-30524 |
| ES220 | 5472 | M00084760D:D09 | B-30524 |
| ES220 | 5472 | M00084845C:H05 | B-30524 |
| ES220 | 5472 | M00084927A:C01 | B-30524 |
| ES220 | 5472 | M00084935B:E10 | B-30524 |
| ES220 | 5472 | M00084974D:F11 | B-30524 |
| ES220 | 5472 | M00084935C:E07 | B-30524 |
| ES220 | 5472 | M00084503D:G10 | B-30524 |
| ES220 | 5472 | M00084907C:C01 | B-30524 |
| ES220 | 5472 | M00084893C:B01 | B-30524 |
| ES220 | 5472 | M00083803B:F11 | B-30524 |
| ES220 | 5472 | M00084945A:D10 | B-30524 |
| ES220 | 5472 | M00084765B:A10 | B-30524 |
| ES220 | 5472 | M00084455D:G03 | B-30524 |
| ES220 | 5472 | M00084874D:E03 | B-30524 |
| ES220 | 5472 | M00084889C:A04 | B-30524 |
| ES220 | 5472 | M00084846B:H07 | B-30524 |
| ES220 | 5472 | M00084967B:B10 | B-30524 |
| ES220 | 5472 | M00084838A:F12 | B-30524 |
| ES220 | 5472 | M00084885A:C01 | B-30524 |
| ES220 | 5472 | M00084823A:H06 | B-30524 |
| ES220 | 5472 | M00084958B:E10 | B-30524 |
| ES220 | 5472 | M00084399B:E05 | B-30524 |
| ES220 | 5472 | M00084880B:D03 | B-30524 |
| ES220 | 5472 | M00084877D:G07 | B-30524 |
| ES220 | 5472 | M00084406B:C03 | B-30524 |
| ES220 | 5472 | M00084856B:A12 | B-30524 |
| ES220 | 5472 | M00084888D:A11 | B-30524 |
| ES220 | 5472 | M00083831D:H11 | B-30524 |
| ES220 | 5472 | M00084481D:C06 | B-30524 |
| ES220 | 5472 | M00083834B:F09 | B-30524 |
| ES220 | 5472 | M00084707D:B08 | B-30524 |
| ES220 | 5472 | M00084976C:C12 | B-30524 |
| ES220 | 5472 | M00085201C:C12 | B-30524 |
| ES220 | 5472 | M00084379D:A05 | B-30524 |
| ES220 | 5472 | M00084392C:G06 | B-30524 |
| ES220 | 5472 | M00084492B:F03 | B-30524 |
| ES220 | 5472 | M00085697B:G05 | B-30524 |
| ES220 | 5472 | M00085683B:B10 | B-30524 |
| ES220 | 5472 | M00084988B:B08 | B-30524 |
| ES220 | 5472 | M00084969C:H11 | B-30524 |
| ES220 | 5472 | M00084988C:G03 | B-30524 |
| ES220 | 5472 | M00085123A:E07 | B-30524 |
| ES220 | 5472 | M00084988C:A04 | B-30524 |
| ES220 | 5472 | M00084363A:C02 | B-30524 |
| ES220 | 5472 | M00084975A:G05 | B-30524 |
| ES220 | 5472 | M00084431C:G08 | B-30524 |
| ES220 | 5472 | M00084972B:H03 | B-30524 |
| ES220 | 5472 | M00084376A:E06 | B-30524 |
| ES220 | 5472 | M00084859C:D09 | B-30524 |
| ES220 | 5472 | M00084957B:H07 | B-30524 |
| ES220 | 5472 | M00085053D:D04 | B-30524 |
| ES220 | 5472 | M00084425A:A01 | B-30524 |
| ES220 | 5472 | M00084367D:E06 | B-30524 |
| ES220 | 5472 | M00084938B:A11 | B-30524 |
| ES220 | 5472 | M00085051A:G03 | B-30524 |
| ES220 | 5472 | M00083817B:G09 | B-30524 |
| ES220 | 5472 | M00085229B:C10 | B-30524 |
| ES220 | 5472 | M00085178D:F01 | B-30524 |
| ES220 | 5472 | M00084980D:D02 | B-30524 |
| ES220 | 5472 | M00085228B:C10 | B-30524 |
| ES220 | 5472 | M00085243A:D07 | B-30524 |
| ES220 | 5472 | M00085031B:E03 | B-30524 |
| ES220 | 5472 | M00085164C:G05 | B-30524 |
| ES220 | 5472 | M00085031C:D05 | B-30524 |
| ES220 | 5472 | M00084251D:C05 | B-30524 |
| ES220 | 5472 | M00085027A:C02 | B-30524 |
| ES220 | 5472 | M00084248D:H09 | B-30524 |
| ES220 | 5472 | M00085209C:F11 | B-30524 |
| ES220 | 5472 | M00084368D:D03 | B-30524 |
| ES220 | 5472 | M00083818A:E09 | B-30524 |
| ES220 | 5472 | M00084980C:E06 | B-30524 |
| ES220 | 5472 | M00084248B:C06 | B-30524 |
| ES220 | 5472 | M00085244C:D03 | B-30524 |
| ES220 | 5472 | M00084987A:D09 | B-30524 |
| ES220 | 5472 | M00084994A:H04 | B-30524 |
| ES220 | 5472 | M00084970D:E08 | B-30524 |
| ES220 | 5472 | M00085038D:D10 | B-30524 |
| ES220 | 5472 | M00085035B:C12 | B-30524 |
| ES220 | 5472 | M00085184D:B08 | B-30524 |
| ES221 | 5473 | M00084666C:A06 | B-30525 |
| ES221 | 5473 | M00084657C:E01 | B-30525 |
| ES221 | 5473 | M00084540B:B08 | B-30525 |
| ES221 | 5473 | M00084415C:C05 | B-30525 |
| ES221 | 5473 | M00084812A:C02 | B-30525 |
| ES221 | 5473 | M00084396B:B03 | B-30525 |
| ES221 | 5473 | M00084844B:H08 | B-30525 |
| ES221 | 5473 | M00084877D:H09 | B-30525 |
| ES221 | 5473 | M00084925C:G01 | B-30525 |
| ES221 | 5473 | M00084970A:C11 | B-30525 |
| ES221 | 5473 | M00084961C:F01 | B-30525 |
| ES221 | 5473 | M00084391B:D06 | B-30525 |
| ES221 | 5473 | M00084694D:F04 | B-30525 |
| ES221 | 5473 | M00084698B:D02 | B-30525 |
| ES221 | 5473 | M00084388A:G03 | B-30525 |
| ES221 | 5473 | M00084973A:C01 | B-30525 |
| ES221 | 5473 | M00084423C:G11 | B-30525 |
| ES221 | 5473 | M00084497D:D03 | B-30525 |
| ES221 | 5473 | M00084889D:G06 | B-30525 |
| ES221 | 5473 | M00084959B:C07 | B-30525 |
| ES221 | 5473 | M00084432B:C05 | B-30525 |
| ES221 | 5473 | M00084489A:D12 | B-30525 |
| ES221 | 5473 | M00084748A:D09 | B-30525 |
| ES221 | 5473 | M00084962C:F10 | B-30525 |
| ES221 | 5473 | M00084767B:D10 | B-30525 |
| ES221 | 5473 | M00084711B:A05 | B-30525 |
| ES221 | 5473 | M00084743A:E03 | B-30525 |
| ES221 | 5473 | M00084466B:E01 | B-30525 |
| ES221 | 5473 | M00084450C:A09 | B-30525 |
| ES221 | 5473 | M00084492C:B05 | B-30525 |
| ES221 | 5473 | M00084487B:A06 | B-30525 |
| ES221 | 5473 | M00084480B:A05 | B-30525 |
| ES221 | 5473 | M00084764D:G08 | B-30525 |
| ES221 | 5473 | M00084743D:H04 | B-30525 |
| ES221 | 5473 | M00084891D:A02 | B-30525 |
| ES221 | 5473 | M00084822C:D06 | B-30525 |
| ES221 | 5473 | M00084853D:A12 | B-30525 |
| ES221 | 5473 | M00084822B:G11 | B-30525 |
| ES221 | 5473 | M00084756D:C04 | B-30525 |
| ES221 | 5473 | M00084839C:B09 | B-30525 |
| ES221 | 5473 | M00084767D:B04 | B-30525 |
| ES221 | 5473 | M00084703A:E04 | B-30525 |
| ES221 | 5473 | M00084853A:F08 | B-30525 |
| ES221 | 5473 | M00084956C:G09 | B-30525 |
| ES221 | 5473 | M00084908C:F07 | B-30525 |
| ES221 | 5473 | M00084902B:A10 | B-30525 |
| ES221 | 5473 | M00084833D:B04 | B-30525 |
| ES221 | 5473 | M00085023D:E11 | B-30525 |
| ES221 | 5473 | M00085151A:B04 | B-30525 |
| ES221 | 5473 | M00085039D:F09 | B-30525 |
| ES221 | 5473 | M00085169A:H12 | B-30525 |
| ES221 | 5473 | M00085052B:E04 | B-30525 |
| ES221 | 5473 | M00085171D:F05 | B-30525 |
| ES221 | 5473 | M00085050A:B06 | B-30525 |
| ES221 | 5473 | M00085155B:F10 | B-30525 |
| ES221 | 5473 | M00085123C:G11 | B-30525 |
| ES221 | 5473 | M00085182B:H10 | B-30525 |
| ES221 | 5473 | M00084675A:E02 | B-30525 |
| ES221 | 5473 | M00085248B:G12 | B-30525 |
| ES221 | 5473 | M00084731C:G07 | B-30525 |
| ES221 | 5473 | M00085701A:A09 | B-30525 |
| ES221 | 5473 | M00085246B:G12 | B-30525 |
| ES221 | 5473 | M00084967C:D12 | B-30525 |
| ES221 | 5473 | M00085190B:C09 | B-30525 |
| ES221 | 5473 | M00085167C:D06 | B-30525 |
| ES221 | 5473 | M00085705A:E01 | B-30525 |
| ES221 | 5473 | M00085214D:G01 | B-30525 |
| ES221 | 5473 | M00084755D:E06 | B-30525 |
| ES221 | 5473 | M00084630D:F09 | B-30525 |
| ES221 | 5473 | M00085191A:B03 | B-30525 |
| ES221 | 5473 | M00085143C:D05 | B-30525 |
| ES221 | 5473 | M00084886A:C06 | B-30525 |
| ES221 | 5473 | M00083803B:F12 | B-30525 |
| ES221 | 5473 | M00084949B:H11 | B-30525 |
| ES221 | 5473 | M00084701C:E08 | B-30525 |
| ES221 | 5473 | M00084945A:H10 | B-30525 |
| ES221 | 5473 | M00084667C:A03 | B-30525 |
| ES221 | 5473 | M00084953D:D03 | B-30525 |
| ES221 | 5473 | M00084539D:D11 | B-30525 |
| ES221 | 5473 | M00084737A:C09 | B-30525 |
| ES221 | 5473 | M00084968C:D10 | B-30525 |
| ES221 | 5473 | M00084670B:A09 | B-30525 |
| ES221 | 5473 | M00085167A:G02 | B-30525 |
| ES221 | 5473 | M00084554C:D05 | B-30525 |
| ES221 | 5473 | M00085145C:D02 | B-30525 |
| ES221 | 5473 | M00084722D:G04 | B-30525 |
| ES221 | 5473 | M00084721C:F09 | B-30525 |
| ES221 | 5473 | M00084866B:A03 | B-30525 |
| ES221 | 5473 | M00084727A:A02 | B-30525 |
| ES221 | 5473 | M00084407A:H09 | B-30525 |
| ES221 | 5473 | M00084855D:H05 | B-30525 |
| ES221 | 5473 | M00084403D:D04 | B-30525 |
| ES221 | 5473 | M00085144D:G03 | B-30525 |
| ES221 | 5473 | M00084880D:A10 | B-30525 |
| ES221 | 5473 | M00084958C:B03 | B-30525 |
| ES221 | 5473 | M00084888C:D12 | B-30525 |
| ES221 | 5473 | M00084587C:G07 | B-30525 |
| ES221 | 5473 | M00083844C:C04 | B-30525 |
| ES221 | 5473 | M00084647D:C05 | B-30525 |
| ES221 | 5473 | M00084528C:F06 | B-30525 |
| ES221 | 5473 | M00084857D:A11 | B-30525 |
| ES221 | 5473 | M00084385A:D02 | B-30525 |
| ES221 | 5473 | M00084561C:D07 | B-30525 |
| ES221 | 5473 | M00084994D:H04 | B-30525 |
| ES221 | 5473 | M00084448B:D11 | B-30525 |
| ES221 | 5473 | M00085006D:C10 | B-30525 |
| ES221 | 5473 | M00084580B:B05 | B-30525 |
| ES221 | 5473 | M00083814D:A10 | B-30525 |
| ES221 | 5473 | M00084970C:G03 | B-30525 |
| ES221 | 5473 | M00084372D:H11 | B-30525 |
| ES221 | 5473 | M00084377B:E11 | B-30525 |
| ES221 | 5473 | M00085230B:G08 | B-30525 |
| ES221 | 5473 | M00084584B:F09 | B-30525 |
| ES221 | 5473 | M00084584B:H12 | B-30525 |
| ES221 | 5473 | M00085249C:C11 | B-30525 |
| ES221 | 5473 | M00084441B:E05 | B-30525 |
| ES221 | 5473 | M00083841A:G01 | B-30525 |
| ES221 | 5473 | M00085006D:C04 | B-30525 |
| ES221 | 5473 | M00084686B:B04 | B-30525 |
| ES221 | 5473 | M00084998A:C12 | B-30525 |
| ES221 | 5473 | M00085034B:E11 | B-30525 |
| ES221 | 5473 | M00084683B:A01 | B-30525 |
| ES221 | 5473 | M00084613A:A01 | B-30525 |
| ES221 | 5473 | M00084633B:A06 | B-30525 |
| ES221 | 5473 | M00085032C:F04 | B-30525 |
| ES221 | 5473 | M00085022B:F05 | B-30525 |
| ES221 | 5473 | M00084509A:E10 | B-30525 |
| ES221 | 5473 | M00084400A:B09 | B-30525 |
| ES221 | 5473 | M00084677C:F03 | B-30525 |
| ES221 | 5473 | M00084427B:D01 | B-30525 |
| ES221 | 5473 | M00083844B:C04 | B-30525 |
| ES221 | 5473 | M00084598D:H05 | B-30525 |
| ES221 | 5473 | M00084443B:C02 | B-30525 |
| ES221 | 5473 | M00084514A:A03 | B-30525 |
| ES221 | 5473 | M00084560C:G05 | B-30525 |
| ES221 | 5473 | M00084504C:F05 | B-30525 |
| ES221 | 5473 | M00084517C:D06 | B-30525 |
| ES221 | 5473 | M00084420C:D03 | B-30525 |
| ES221 | 5473 | M00084524D:D02 | B-30525 |
| ES221 | 5473 | M00084499D:A10 | B-30525 |
| ES221 | 5473 | M00085022B:B03 | B-30525 |
| ES221 | 5473 | M00084958B:E10 | B-30525 |
| ES221 | 5473 | M00084513C:C10 | B-30525 |
| ES221 | 5473 | M00084595B:C08 | B-30525 |
| ES221 | 5473 | M00083804A:H12 | B-30525 |
| ES221 | 5473 | M00084859D:B03 | B-30525 |
| ES221 | 5473 | M00084641B:F08 | B-30525 |
| ES221 | 5473 | M00084844A:E10 | B-30525 |
| ES221 | 5473 | M00083838A:E05 | B-30525 |
| ES221 | 5473 | M00083849C:F11 | B-30525 |
| ES221 | 5473 | M00084461C:D06 | B-30525 |
| ES221 | 5473 | M00084810D:B10 | B-30525 |
| ES221 | 5473 | M00085047D:F08 | B-30525 |
| ES221 | 5473 | M00084912D:G06 | B-30525 |
| ES221 | 5473 | M00084645C:F07 | B-30525 |
| ES221 | 5473 | M00084912D:A09 | B-30525 |
| ES221 | 5473 | M00084862B:B01 | B-30525 |
| ES221 | 5473 | M00084938C:G06 | B-30525 |
| ES221 | 5473 | M00084534B:E12 | B-30525 |
| ES221 | 5473 | M00084909C:G02 | B-30525 |
| ES221 | 5473 | M00084973A:A01 | B-30525 |
| ES221 | 5473 | M00084651B:G10 | B-30525 |
| ES221 | 5473 | M00084925A:B08 | B-30525 |
| ES221 | 5473 | M00084568D:A02 | B-30525 |
| ES221 | 5473 | M00084456A:H04 | B-30525 |
| ES221 | 5473 | M00084988C:B01 | B-30525 |
| ES221 | 5473 | M00084842C:B07 | B-30525 |
| ES221 | 5473 | M00084708A:A11 | B-30525 |
| ES221 | 5473 | M00084602C:E04 | B-30525 |
| ES221 | 5473 | M00084757B:F11 | B-30525 |
| ES221 | 5473 | M00084483A:C06 | B-30525 |
| ES221 | 5473 | M00084605B:H04 | B-30525 |
| ES221 | 5473 | M00083812C:G02 | B-30525 |
| ES221 | 5473 | M00084610D:H04 | B-30525 |
| ES221 | 5473 | M00085056D:B12 | B-30525 |
| ES221 | 5473 | M00085017C:A11 | B-30525 |
| ES221 | 5473 | M00084573A:A10 | B-30525 |
| ES221 | 5473 | M00084637B:E01 | B-30525 |
| ES221 | 5473 | M00085056B:B06 | B-30525 |
| ES221 | 5473 | M00084510C:H01 | B-30525 |
| ES221 | 5473 | M00084577B:C08 | B-30525 |
| ES221 | 5473 | M00084646B:B03 | B-30525 |
| ES221 | 5473 | M00084844C:F04 | B-30525 |
| ES221 | 5473 | M00084894B:F11 | B-30525 |
| ES221 | 5473 | M00084930B:E12 | B-30525 |
| ES221 | 5473 | M00084469B:F08 | B-30525 |
| ES221 | 5473 | M00084569D:B04 | B-30525 |
| ES221 | 5473 | M00084453D:B12 | B-30525 |
| ES221 | 5473 | M00083844A:E12 | B-30525 |
| ES221 | 5473 | M00085009D:A02 | B-30525 |
| ES221 | 5473 | M00084619A:E04 | B-30525 |
| ES221 | 5473 | M00085006C:C07 | B-30525 |
| ES222 | 5474 | M00084459A:F10 | B-30526 |
| ES222 | 5474 | M00084721B:C11 | B-30526 |
| ES222 | 5474 | M00084454A:G08 | B-30526 |
| ES222 | 5474 | M00084460D:B04 | B-30526 |
| ES222 | 5474 | M00084723D:G09 | B-30526 |
| ES222 | 5474 | M00084704A:C12 | B-30526 |
| ES222 | 5474 | M00084487C:H06 | B-30526 |
| ES222 | 5474 | M00084867C:G02 | B-30526 |
| ES222 | 5474 | M00084475B:D03 | B-30526 |
| ES222 | 5474 | M00084490A:C12 | B-30526 |
| ES222 | 5474 | M00084865D:G02 | B-30526 |
| ES222 | 5474 | M00084876D:A06 | B-30526 |
| ES222 | 5474 | M00084553D:G05 | B-30526 |
| ES222 | 5474 | M00084558D:A04 | B-30526 |
| ES222 | 5474 | M00084645B:A06 | B-30526 |
| ES222 | 5474 | M00084747D:G02 | B-30526 |
| ES222 | 5474 | M00084884D:D03 | B-30526 |
| ES222 | 5474 | M00084700A:C10 | B-30526 |
| ES222 | 5474 | M00084973A:C01 | B-30526 |
| ES222 | 5474 | M00084493A:E03 | B-30526 |
| ES222 | 5474 | M00084497B:C12 | B-30526 |
| ES222 | 5474 | M00084500D:B11 | B-30526 |
| ES222 | 5474 | M00084523C:C10 | B-30526 |
| ES222 | 5474 | M00084526D:E09 | B-30526 |
| ES222 | 5474 | M00084923D:B05 | B-30526 |
| ES222 | 5474 | M00084962C:F10 | B-30526 |
| ES222 | 5474 | M00084669C:A10 | B-30526 |
| ES222 | 5474 | M00084444D:F09 | B-30526 |
| ES222 | 5474 | M00084757B:F05 | B-30526 |
| ES222 | 5474 | M00084922A:C08 | B-30526 |
| ES222 | 5474 | M00084960D:D02 | B-30526 |
| ES222 | 5474 | M00084837B:E06 | B-30526 |
| ES222 | 5474 | M00084763D:A04 | B-30526 |
| ES222 | 5474 | M00084651C:H01 | B-30526 |
| ES222 | 5474 | M00084441D:E09 | B-30526 |
| ES222 | 5474 | M00084509D:C02 | B-30526 |
| ES222 | 5474 | M00084510D:D05 | B-30526 |
| ES222 | 5474 | M00084657D:B10 | B-30526 |
| ES222 | 5474 | M00084946D:H05 | B-30526 |
| ES222 | 5474 | M00084506A:E08 | B-30526 |
| ES222 | 5474 | M00084420D:C07 | B-30526 |
| ES222 | 5474 | M00085247A:F05 | B-30526 |
| ES222 | 5474 | M00085142D:F04 | B-30526 |
| ES222 | 5474 | M00085151A:H09 | B-30526 |
| ES222 | 5474 | M00085029D:E12 | B-30526 |
| ES222 | 5474 | M00085141C:G06 | B-30526 |
| ES222 | 5474 | M00085035D:D09 | B-30526 |
| ES222 | 5474 | M00085168D:D04 | B-30526 |
| ES222 | 5474 | M00084995B:B08 | B-30526 |
| ES222 | 5474 | M00085008B:H11 | B-30526 |
| ES222 | 5474 | M00085059B:H11 | B-30526 |
| ES222 | 5474 | M00085125C:H06 | B-30526 |
| ES222 | 5474 | M00084890B:E02 | B-30526 |
| ES222 | 5474 | M00084418D:A04 | B-30526 |
| ES222 | 5474 | M00084961C:A06 | B-30526 |
| ES222 | 5474 | M00084766B:E03 | B-30526 |
| ES222 | 5474 | M00084406A:B03 | B-30526 |
| ES222 | 5474 | M00085686A:C05 | B-30526 |
| ES222 | 5474 | M00085124A:G04 | B-30526 |
| ES222 | 5474 | M00085059B:H07 | B-30526 |
| ES222 | 5474 | M00084646B:D07 | B-30526 |
| ES222 | 5474 | M00084246B:D10 | B-30526 |
| ES222 | 5474 | M00084974D:F11 | B-30526 |
| ES222 | 5474 | M00084738B:A09 | B-30526 |
| ES222 | 5474 | M00085015A:C09 | B-30526 |
| ES222 | 5474 | M00083839B:G09 | B-30526 |
| ES222 | 5474 | M00085012C:D06 | B-30526 |
| ES222 | 5474 | M00085058A:H02 | B-30526 |
| ES222 | 5474 | M00085009C:C01 | B-30526 |
| ES222 | 5474 | M00083818C:A02 | B-30526 |
| ES222 | 5474 | M00085007B:C07 | B-30526 |
| ES222 | 5474 | M00085047A:H02 | B-30526 |
| ES222 | 5474 | M00085245C:D07 | B-30526 |
| ES222 | 5474 | M00085032D:C03 | B-30526 |
| ES222 | 5474 | M00085039B:E09 | B-30526 |
| ES222 | 5474 | M00085053C:D07 | B-30526 |
| ES222 | 5474 | M00084364D:F08 | B-30526 |
| ES222 | 5474 | M00085152B:A06 | B-30526 |
| ES222 | 5474 | M00084969C:F03 | B-30526 |
| ES222 | 5474 | M00084896B:G10 | B-30526 |
| ES222 | 5474 | M00084427C:D04 | B-30526 |
| ES222 | 5474 | M00085018C:B09 | B-30526 |
| ES222 | 5474 | M00084668D:D08 | B-30526 |
| ES222 | 5474 | M00085175B:A03 | B-30526 |
| ES222 | 5474 | M00084437C:G05 | B-30526 |
| ES222 | 5474 | M00084967B:B10 | B-30526 |
| ES222 | 5474 | M00084998B:A04 | B-30526 |
| ES222 | 5474 | M00084716D:H03 | B-30526 |
| ES222 | 5474 | M00084708B:A06 | B-30526 |
| ES222 | 5474 | M00084755B:A04 | B-30526 |
| ES222 | 5474 | M00084380C:C09 | B-30526 |
| ES222 | 5474 | M00085013A:E06 | B-30526 |
| ES222 | 5474 | M00084374A:A10 | B-30526 |
| ES222 | 5474 | M00085194C:B12 | B-30526 |
| ES222 | 5474 | M00084971C:G07 | B-30526 |
| ES222 | 5474 | M00084515D:G03 | B-30526 |
| ES222 | 5474 | M00084961D:H03 | B-30526 |
| ES222 | 5474 | M00084908D:B11 | B-30526 |
| ES222 | 5474 | M00084702A:B08 | B-30526 |
| ES222 | 5474 | M00083838C:F07 | B-30526 |
| ES222 | 5474 | M00084390B:H04 | B-30526 |
| ES222 | 5474 | M00084734A:H01 | B-30526 |
| ES222 | 5474 | M00083817B:A11 | B-30526 |
| ES222 | 5474 | M00085176C:B11 | B-30526 |
| ES222 | 5474 | M00084902C:F05 | B-30526 |
| ES222 | 5474 | M00085677A:E02 | B-30526 |
| ES222 | 5474 | M00084948D:B08 | B-30526 |
| ES222 | 5474 | M00085190B:H04 | B-30526 |
| ES222 | 5474 | M00084820D:A03 | B-30526 |
| ES222 | 5474 | M00084479B:E04 | B-30526 |
| ES222 | 5474 | M00084408D:E06 | B-30526 |
| ES222 | 5474 | M00085009B:F10 | B-30526 |
| ES222 | 5474 | M00085697A:F01 | B-30526 |
| ES222 | 5474 | M00084423D:B05 | B-30526 |
| ES222 | 5474 | M00084973A:A01 | B-30526 |
| ES222 | 5474 | M00083804B:C03 | B-30526 |
| ES222 | 5474 | M00084841B:H09 | B-30526 |
| ES222 | 5474 | M00084685D:B11 | B-30526 |
| ES222 | 5474 | M00084599D:C02 | B-30526 |
| ES222 | 5474 | M00084573D:G11 | B-30526 |
| ES222 | 5474 | M00084603A:B07 | B-30526 |
| ES222 | 5474 | M00084823D:E06 | B-30526 |
| ES222 | 5474 | M00084565A:D10 | B-30526 |
| ES222 | 5474 | M00084767B:F06 | B-30526 |
| ES222 | 5474 | M00084963D:D07 | B-30526 |
| ES222 | 5474 | M00084611A:A06 | B-30526 |
| ES222 | 5474 | M00084829B:F06 | B-30526 |
| ES222 | 5474 | M00084850C:A11 | B-30526 |
| ES222 | 5474 | M00084540D:B12 | B-30526 |
| ES222 | 5474 | M00084614C:G05 | B-30526 |
| ES222 | 5474 | M00084826B:D12 | B-30526 |
| ES222 | 5474 | M00084605D:G09 | B-30526 |
| ES222 | 5474 | M00084923D:F11 | B-30526 |
| ES222 | 5474 | M00084664D:E05 | B-30526 |
| ES222 | 5474 | M00084533A:C04 | B-30526 |
| ES222 | 5474 | M00084843D:F05 | B-30526 |
| ES222 | 5474 | M00084894A:G09 | B-30526 |
| ES222 | 5474 | M00084913B:F05 | B-30526 |
| ES222 | 5474 | M00083817D:A08 | B-30526 |
| ES222 | 5474 | M00084451D:A03 | B-30526 |
| ES222 | 5474 | M00084675B:A04 | B-30526 |
| ES222 | 5474 | M00084889A:B07 | B-30526 |
| ES222 | 5474 | M00084879A:A04 | B-30526 |
| ES222 | 5474 | M00084638D:A05 | B-30526 |
| ES222 | 5474 | M00084468A:A09 | B-30526 |
| ES222 | 5474 | M00084634A:D01 | B-30526 |
| ES222 | 5474 | M00084577B:D04 | B-30526 |
| ES222 | 5474 | M00084860B:A01 | B-30526 |
| ES222 | 5474 | M00084567B:F03 | B-30526 |
| ES222 | 5474 | M00084619A:G10 | B-30526 |
| ES222 | 5474 | M00084683A:B12 | B-30526 |
| ES222 | 5474 | M00084631D:G01 | B-30526 |
| ES222 | 5474 | M00084520B:A12 | B-30526 |
| ES222 | 5474 | M00084886B:D06 | B-30526 |
| ES222 | 5474 | M00084727A:G09 | B-30526 |
| ES222 | 5474 | M00084393A:G07 | B-30526 |
| ES222 | 5474 | M00084571A:C02 | B-30526 |
| ES222 | 5474 | M00084866C:H04 | B-30526 |
| ES222 | 5474 | M00084449A:D09 | B-30526 |
| ES222 | 5474 | M00084857C:E11 | B-30526 |
| ES222 | 5474 | M00085226C:F08 | B-30526 |
| ES222 | 5474 | M00084392C:D03 | B-30526 |
| ES222 | 5474 | M00084389A:F12 | B-30526 |
| ES222 | 5474 | M00084696C:A07 | B-30526 |
| ES222 | 5474 | M00084397D:A09 | B-30526 |
| ES222 | 5474 | M00085173A:B07 | B-30526 |
| ES222 | 5474 | M00084252B:H01 | B-30526 |
| ES222 | 5474 | M00084970C:H09 | B-30526 |
| ES222 | 5474 | M00084648A:F08 | B-30526 |
| ES222 | 5474 | M00085245D:G07 | B-30526 |
| ES222 | 5474 | M00084642C:F10 | B-30526 |
| ES222 | 5474 | M00085220D:E06 | B-30526 |
| ES222 | 5474 | M00084745A:H04 | B-30526 |
| ES222 | 5474 | M00083809B:E08 | B-30526 |
| ES222 | 5474 | M00084940B:F06 | B-30526 |
| ES222 | 5474 | M00084533B:B10 | B-30526 |
| ES222 | 5474 | M00084970D:B01 | B-30526 |
| ES222 | 5474 | M00084583D:H12 | B-30526 |
| ES222 | 5474 | M00084585D:H12 | B-30526 |
| ES222 | 5474 | M00084581B:E06 | B-30526 |
| ES222 | 5474 | M00084588B:D02 | B-30526 |
| ES222 | 5474 | M00084919D:B08 | B-30526 |
| ES222 | 5474 | M00084812A:E05 | B-30526 |
| ES222 | 5474 | M00084768B:E09 | B-30526 |
| ES222 | 5474 | M00084748A:H02 | B-30526 |
| ES222 | 5474 | M00084519B:D01 | B-30526 |
| ES222 | 5474 | M00084926B:C05 | B-30526 |
| ES222 | 5474 | M00084847B:G05 | B-30526 |
| ES222 | 5474 | M00084858C:B01 | B-30526 |
| ES222 | 5474 | M00084483A:E05 | B-30526 |
| ES222 | 5474 | M00084596A:G03 | B-30526 |
| ES222 | 5474 | M00084681B:G11 | B-30526 |
| ES223 | 5475 | M00085368B:A02 | B-30527 |
| ES223 | 5475 | M00085365C:C09 | B-30527 |
| ES223 | 5475 | M00085317B:G09 | B-30527 |
| ES223 | 5475 | M00085732A:B09 | B-30527 |
| ES223 | 5475 | M00085649C:A12 | B-30527 |
| ES223 | 5475 | M00085337C:E09 | B-30527 |
| ES223 | 5475 | M00085520C:D02 | B-30527 |
| ES223 | 5475 | M00085358B:A04 | B-30527 |
| ES223 | 5475 | M00085640A:H11 | B-30527 |
| ES223 | 5475 | M00085344D:B07 | B-30527 |
| ES223 | 5475 | M00085314C:F01 | B-30527 |
| ES223 | 5475 | M00085334A:D10 | B-30527 |
| ES223 | 5475 | M00085262C:E04 | B-30527 |
| ES223 | 5475 | M00083750D:G12 | B-30527 |
| ES223 | 5475 | M00085255B:F11 | B-30527 |
| ES223 | 5475 | M00085701D:A02 | B-30527 |
| ES223 | 5475 | M00086280B:G09 | B-30527 |
| ES223 | 5475 | M00085628C:D08 | B-30527 |
| ES223 | 5475 | M00083726B:E07 | B-30527 |
| ES223 | 5475 | M00086285B:C10 | B-30527 |
| ES223 | 5475 | M00086084D:E12 | B-30527 |
| ES223 | 5475 | M00085446A:D04 | B-30527 |
| ES223 | 5475 | M00085697D:H11 | B-30527 |
| ES223 | 5475 | M00086085A:H03 | B-30527 |
| ES223 | 5475 | M00086057A:F07 | B-30527 |
| ES223 | 5475 | M00086196A:F07 | B-30527 |
| ES223 | 5475 | M00086279A:B07 | B-30527 |
| ES223 | 5475 | M00086266B:E10 | B-30527 |
| ES223 | 5475 | M00086280A:E02 | B-30527 |
| ES223 | 5475 | M00085309A:D11 | B-30527 |
| ES223 | 5475 | M00086291D:B08 | B-30527 |
| ES223 | 5475 | M00085861C:A03 | B-30527 |
| ES223 | 5475 | M00086247A:G11 | B-30527 |
| ES223 | 5475 | M00085373C:B06 | B-30527 |
| ES223 | 5475 | M00085332D:B03 | B-30527 |
| ES223 | 5475 | M00085632C:A06 | B-30527 |
| ES223 | 5475 | M00085360B:G03 | B-30527 |
| ES223 | 5475 | M00086191A:G09 | B-30527 |
| ES223 | 5475 | M00085473C:B02 | B-30527 |
| ES223 | 5475 | M00085600B:B03 | B-30527 |
| ES223 | 5475 | M00083749D:B09 | B-30527 |
| ES223 | 5475 | M00085301B:C10 | B-30527 |
| ES223 | 5475 | M00085278D:F03 | B-30527 |
| ES223 | 5475 | M00085296C:C09 | B-30527 |
| ES223 | 5475 | M00085435B:C05 | B-30527 |
| ES223 | 5475 | M00085533C:D11 | B-30527 |
| ES223 | 5475 | M00086061B:E02 | B-30527 |
| ES223 | 5475 | M00085284D:A09 | B-30527 |
| ES223 | 5475 | M00085566A:D12 | B-30527 |
| ES223 | 5475 | M00085528A:E02 | B-30527 |
| ES223 | 5475 | M00085336D:B10 | B-30527 |
| ES223 | 5475 | M00085315C:B03 | B-30527 |
| ES223 | 5475 | M00085509A:A02 | B-30527 |
| ES223 | 5475 | M00083698D:E01 | B-30527 |
| ES223 | 5475 | M00083701D:G09 | B-30527 |
| ES223 | 5475 | M00086155A:G12 | B-30527 |
| ES223 | 5475 | M00085293B:B05 | B-30527 |
| ES223 | 5475 | M00085728B:C08 | B-30527 |
| ES223 | 5475 | M00085611B:D03 | B-30527 |
| ES223 | 5475 | M00085592A:G06 | B-30527 |
| ES223 | 5475 | M00085304A:B11 | B-30527 |
| ES223 | 5475 | M00085266D:C09 | B-30527 |
| ES223 | 5475 | M00085335B:D09 | B-30527 |
| ES223 | 5475 | M00085707C:A10 | B-30527 |
| ES223 | 5475 | M00085555D:F08 | B-30527 |
| ES223 | 5475 | M00085588B:G10 | B-30527 |
| ES223 | 5475 | M00085264C:F04 | B-30527 |
| ES223 | 5475 | M00085733D:E05 | B-30527 |
| ES223 | 5475 | M00085647A:C08 | B-30527 |
| ES223 | 5475 | M00083714C:F04 | B-30527 |
| ES223 | 5475 | M00085707A:F01 | B-30527 |
| ES223 | 5475 | M00085548C:D04 | B-30527 |
| ES223 | 5475 | M00083745A:A10 | B-30527 |
| ES223 | 5475 | M00085396B:G04 | B-30527 |
| ES223 | 5475 | M00085449C:D04 | B-30527 |
| ES223 | 5475 | M00083698B:H01 | B-30527 |
| ES223 | 5475 | M00084772C:G12 | B-30527 |
| ES223 | 5475 | M00086126C:D09 | B-30527 |
| ES223 | 5475 | M00085808D:E01 | B-30527 |
| ES223 | 5475 | M00085927A:F06 | B-30527 |
| ES223 | 5475 | M00085814C:C12 | B-30527 |
| ES223 | 5475 | M00086015A:B03 | B-30527 |
| ES223 | 5475 | M00086146D:A09 | B-30527 |
| ES223 | 5475 | M00085076C:A07 | B-30527 |
| ES223 | 5475 | M00085427C:A04 | B-30527 |
| ES223 | 5475 | M00084774B:C10 | B-30527 |
| ES223 | 5475 | M00085432A:H08 | B-30527 |
| ES223 | 5475 | M00084796D:B01 | B-30527 |
| ES223 | 5475 | M00086127C:C05 | B-30527 |
| ES223 | 5475 | M00086160D:F08 | B-30527 |
| ES223 | 5475 | M00084802A:H09 | B-30527 |
| ES223 | 5475 | M00086081D:H11 | B-30527 |
| ES223 | 5475 | M00086106D:H01 | B-30527 |
| ES223 | 5475 | M00086159A:F05 | B-30527 |
| ES223 | 5475 | M00084782D:H08 | B-30527 |
| ES223 | 5475 | M00085956D:G04 | B-30527 |
| ES223 | 5475 | M00085770C:A12 | B-30527 |
| ES223 | 5475 | M00086008D:F08 | B-30527 |
| ES223 | 5475 | M00086018A:A05 | B-30527 |
| ES223 | 5475 | M00085761A:B03 | B-30527 |
| ES223 | 5475 | M00085751A:A11 | B-30527 |
| ES223 | 5475 | M00085956B:E08 | B-30527 |
| ES223 | 5475 | M00085955C:C03 | B-30527 |
| ES223 | 5475 | M00085904D:D02 | B-30527 |
| ES223 | 5475 | M00085899C:G10 | B-30527 |
| ES223 | 5475 | M00085927C:G10 | B-30527 |
| ES223 | 5475 | M00085896D:A11 | B-30527 |
| ES223 | 5475 | M00085892A:F04 | B-30527 |
| ES223 | 5475 | M00085882B:F11 | B-30527 |
| ES223 | 5475 | M00085419A:G09 | B-30527 |
| ES223 | 5475 | M00085962B:A12 | B-30527 |
| ES223 | 5475 | M00085811B:D12 | B-30527 |
| ES223 | 5475 | M00085986B:H02 | B-30527 |
| ES223 | 5475 | M00085922A:A08 | B-30527 |
| ES223 | 5475 | M00085854C:F04 | B-30527 |
| ES223 | 5475 | M00085835D:F06 | B-30527 |
| ES223 | 5475 | M00086183A:H04 | B-30527 |
| ES223 | 5475 | M00086193A:F04 | B-30527 |
| ES223 | 5475 | M00086197B:A03 | B-30527 |
| ES223 | 5475 | M00086203C:H04 | B-30527 |
| ES223 | 5475 | M00085827D:D01 | B-30527 |
| ES223 | 5475 | M00086097D:D12 | B-30527 |
| ES223 | 5475 | M00086294C:G05 | B-30527 |
| ES223 | 5475 | M00086176C:A06 | B-30527 |
| ES223 | 5475 | M00085825C:D12 | B-30527 |
| ES223 | 5475 | M00085849D:G06 | B-30527 |
| ES223 | 5475 | M00085817C:C10 | B-30527 |
| ES223 | 5475 | M00085807D:G11 | B-30527 |
| ES223 | 5475 | M00085839B:B12 | B-30527 |
| ES223 | 5475 | M00085750A:G03 | B-30527 |
| ES223 | 5475 | M00086248A:H09 | B-30527 |
| ES223 | 5475 | M00085964A:B11 | B-30527 |
| ES223 | 5475 | M00086003D:G08 | B-30527 |
| ES223 | 5475 | M00085819D:C02 | B-30527 |
| ES223 | 5475 | M00085066B:D12 | B-30527 |
| ES223 | 5475 | M00084775C:E05 | B-30527 |
| ES223 | 5475 | M00085083A:E04 | B-30527 |
| ES223 | 5475 | M00085090C:C09 | B-30527 |
| ES223 | 5475 | M00085100A:H07 | B-30527 |
| ES223 | 5475 | M00085101C:H03 | B-30527 |
| ES223 | 5475 | M00085105D:H02 | B-30527 |
| ES223 | 5475 | M00086323B:C04 | B-30527 |
| ES223 | 5475 | M00084808D:A07 | B-30527 |
| ES223 | 5475 | M00086003D:B10 | B-30527 |
| ES223 | 5475 | M00084787B:D12 | B-30527 |
| ES223 | 5475 | M00085068C:B03 | B-30527 |
| ES223 | 5475 | M00086291A:E10 | B-30527 |
| ES223 | 5475 | M00084807D:F07 | B-30527 |
| ES223 | 5475 | M00084799C:E08 | B-30527 |
| ES223 | 5475 | M00084781A:E05 | B-30527 |
| ES223 | 5475 | M00086324D:D01 | B-30527 |
| ES224 | 5476 | M00085641C:G01 | B-30528 |
| ES224 | 5476 | M00085623B:G11 | B-30528 |
| ES224 | 5476 | M00085805A:G07 | B-30528 |
| ES224 | 5476 | M00085846A:H10 | B-30528 |
| ES224 | 5476 | M00085369D:G04 | B-30528 |
| ES224 | 5476 | M00085817C:G05 | B-30528 |
| ES224 | 5476 | M00085635C:H07 | B-30528 |
| ES224 | 5476 | M00085907B:B11 | B-30528 |
| ES224 | 5476 | M00085650D:E12 | B-30528 |
| ES224 | 5476 | M00085854A:D09 | B-30528 |
| ES224 | 5476 | M00085628B:D03 | B-30528 |
| ES224 | 5476 | M00085393A:D06 | B-30528 |
| ES224 | 5476 | M00085620C:F05 | B-30528 |
| ES224 | 5476 | M00085750B:C10 | B-30528 |
| ES224 | 5476 | M00085773A:F05 | B-30528 |
| ES224 | 5476 | M00085933B:B06 | B-30528 |
| ES224 | 5476 | M00084804B:E01 | B-30528 |
| ES224 | 5476 | M00085337B:F08 | B-30528 |
| ES224 | 5476 | M00085349A:C08 | B-30528 |
| ES224 | 5476 | M00084783C:A09 | B-30528 |
| ES224 | 5476 | M00084782D:D10 | B-30528 |
| ES224 | 5476 | M00085273A:A09 | B-30528 |
| ES224 | 5476 | M00084794B:C01 | B-30528 |
| ES224 | 5476 | M00084780D:D07 | B-30528 |
| ES224 | 5476 | M00085345B:C09 | B-30528 |
| ES224 | 5476 | M00085344D:F01 | B-30528 |
| ES224 | 5476 | M00085747A:B11 | B-30528 |
| ES224 | 5476 | M00085814A:C02 | B-30528 |
| ES224 | 5476 | M00085503D:D05 | B-30528 |
| ES224 | 5476 | M00085304B:D11 | B-30528 |
| ES224 | 5476 | M00085900B:E02 | B-30528 |
| ES224 | 5476 | M00085859B:A11 | B-30528 |
| ES224 | 5476 | M00085860D:H02 | B-30528 |
| ES224 | 5476 | M00085649B:A03 | B-30528 |
| ES224 | 5476 | M00085815C:E11 | B-30528 |
| ES224 | 5476 | M00085941B:A06 | B-30528 |
| ES224 | 5476 | M00084800B:H09 | B-30528 |
| ES224 | 5476 | M00085919B:F02 | B-30528 |
| ES224 | 5476 | M00085449A:E02 | B-30528 |
| ES224 | 5476 | M00085344A:G08 | B-30528 |
| ES224 | 5476 | M00085520D:B11 | B-30528 |
| ES224 | 5476 | M00086035A:C11 | B-30528 |
| ES224 | 5476 | M00085955D:H10 | B-30528 |
| ES224 | 5476 | M00086175C:D06 | B-30528 |
| ES224 | 5476 | M00085510B:G12 | B-30528 |
| ES224 | 5476 | M00085927C:G11 | B-30528 |
| ES224 | 5476 | M00085919A:A05 | B-30528 |
| ES224 | 5476 | M00085985C:D02 | B-30528 |
| ES224 | 5476 | M00085934B:E12 | B-30528 |
| ES224 | 5476 | M00085389C:H04 | B-30528 |
| ES224 | 5476 | M00085406A:F03 | B-30528 |
| ES224 | 5476 | M00085826D:B03 | B-30528 |
| ES224 | 5476 | M00085819C:F06 | B-30528 |
| ES224 | 5476 | M00085266B:C06 | B-30528 |
| ES224 | 5476 | M00086112C:A01 | B-30528 |
| ES224 | 5476 | M00086005A:B02 | B-30528 |
| ES224 | 5476 | M00085548D:F01 | B-30528 |
| ES224 | 5476 | M00085809A:E04 | B-30528 |
| ES224 | 5476 | M00085389B:B05 | B-30528 |
| ES224 | 5476 | M00085761C:E07 | B-30528 |
| ES224 | 5476 | M00085454A:G06 | B-30528 |
| ES224 | 5476 | M00085980B:F06 | B-30528 |
| ES224 | 5476 | M00085367B:C02 | B-30528 |
| ES224 | 5476 | M00085922A:E10 | B-30528 |
| ES224 | 5476 | M00085830B:E09 | B-30528 |
| ES224 | 5476 | M00085611C:D09 | B-30528 |
| ES224 | 5476 | M00085810A:A10 | B-30528 |
| ES224 | 5476 | M00085534D:H09 | B-30528 |
| ES224 | 5476 | M00085390D:A03 | B-30528 |
| ES224 | 5476 | M00085419C:H05 | B-30528 |
| ES224 | 5476 | M00085441D:H10 | B-30528 |
| ES224 | 5476 | M00085434C:G06 | B-30528 |
| ES224 | 5476 | M00085428B:G02 | B-30528 |
| ES224 | 5476 | M00086225B:E01 | B-30528 |
| ES224 | 5476 | M00085835B:E11 | B-30528 |
| ES224 | 5476 | M00085590A:G06 | B-30528 |
| ES224 | 5476 | M00086322D:D05 | B-30528 |
| ES224 | 5476 | M00085255D:E12 | B-30528 |
| ES224 | 5476 | M00086259A:F11 | B-30528 |
| ES224 | 5476 | M00086233C:F01 | B-30528 |
| ES224 | 5476 | M00086038A:D03 | B-30528 |
| ES224 | 5476 | M00085569B:C09 | B-30528 |
| ES224 | 5476 | M00084804C:H10 | B-30528 |
| ES224 | 5476 | M00086000A:C05 | B-30528 |
| ES224 | 5476 | M00085605A:D08 | B-30528 |
| ES224 | 5476 | M00083706A:D02 | B-30528 |
| ES224 | 5476 | M00086202C:A07 | B-30528 |
| ES224 | 5476 | M00083691C:E12 | B-30528 |
| ES224 | 5476 | M00083740C:G01 | B-30528 |
| ES224 | 5476 | M00086159A:F03 | B-30528 |
| ES224 | 5476 | M00085323C:H07 | B-30528 |
| ES224 | 5476 | M00085326B:D08 | B-30528 |
| ES224 | 5476 | M00086270C:D08 | B-30528 |
| ES224 | 5476 | M00086027A:G04 | B-30528 |
| ES224 | 5476 | M00085691A:E06 | B-30528 |
| ES224 | 5476 | M00086276D:F10 | B-30528 |
| ES224 | 5476 | M00086060C:F04 | B-30528 |
| ES224 | 5476 | M00086206A:E10 | B-30528 |
| ES224 | 5476 | M00086087C:D04 | B-30528 |
| ES224 | 5476 | M00083699B:C12 | B-30528 |
| ES224 | 5476 | M00086076B:D02 | B-30528 |
| ES224 | 5476 | M00086288A:B05 | B-30528 |
| ES224 | 5476 | M00085252B:H07 | B-30528 |
| ES224 | 5476 | M00086166D:H04 | B-30528 |
| ES224 | 5476 | M00086184C:D04 | B-30528 |
| ES224 | 5476 | M00085555A:A06 | B-30528 |
| ES224 | 5476 | M00085733D:F08 | B-30528 |
| ES224 | 5476 | M00085887C:B03 | B-30528 |
| ES224 | 5476 | M00086155D:E12 | B-30528 |
| ES224 | 5476 | M00086279C:A08 | B-30528 |
| ES224 | 5476 | M00083710D:B09 | B-30528 |
| ES224 | 5476 | M00086228A:F11 | B-30528 |
| ES224 | 5476 | M00086145A:F07 | B-30528 |
| ES224 | 5476 | M00085100B:C12 | B-30528 |
| ES224 | 5476 | M00085287C:G08 | B-30528 |
| ES224 | 5476 | M00083729C:F10 | B-30528 |
| ES224 | 5476 | M00083692C:D09 | B-30528 |
| ES224 | 5476 | M00086090B:B09 | B-30528 |
| ES224 | 5476 | M00086120A:D11 | B-30528 |
| ES224 | 5476 | M00086031C:G11 | B-30528 |
| ES224 | 5476 | M00085294D:G03 | B-30528 |
| ES224 | 5476 | M00086114D:G11 | B-30528 |
| ES224 | 5476 | M00085720D:A03 | B-30528 |
| ES224 | 5476 | M00085262A:A02 | B-30528 |
| ES224 | 5476 | M00085732A:G04 | B-30528 |
| ES224 | 5476 | M00086159B:E04 | B-30528 |
| ES224 | 5476 | M00084781A:H09 | B-30528 |
| ES224 | 5476 | M00086235A:F05 | B-30528 |
| ES224 | 5476 | M00086097C:B10 | B-30528 |
| ES224 | 5476 | M00084779B:D03 | B-30528 |
| ES224 | 5476 | M00086085D:F09 | B-30528 |
| ES224 | 5476 | M00086286C:H02 | B-30528 |
| ES224 | 5476 | M00083733B:D08 | B-30528 |
| ES224 | 5476 | M00085322D:G05 | B-30528 |
| ES224 | 5476 | M00085071B:D07 | B-30528 |
| ES224 | 5476 | M00085707A:A04 | B-30528 |
| ES224 | 5476 | M00083736A:D10 | B-30528 |
| ES224 | 5476 | M00085301C:H11 | B-30528 |
| ES224 | 5476 | M00085066D:A05 | B-30528 |
| ES224 | 5476 | M00086294D:F08 | B-30528 |
| ES224 | 5476 | M00084773C:D04 | B-30528 |
| ES224 | 5476 | M00085280D:F06 | B-30528 |
| ES224 | 5476 | M00086302A:E06 | B-30528 |
| ES224 | 5476 | M00085084A:E12 | B-30528 |
| ES224 | 5476 | M00085105C:D01 | B-30528 |
| ES224 | 5476 | M00085297A:A11 | B-30528 |
| ES224 | 5476 | M00085076C:H01 | B-30528 |
| ES224 | 5476 | M00086286B:F08 | B-30528 |
| ES224 | 5476 | M00085107D:H08 | B-30528 |
| ES224 | 5476 | M00085092D:D09 | B-30528 |
| ES225 | 5477 | M00086103D:E08 | B-30529 |
| ES225 | 5477 | M00086272D:E04 | B-30529 |
| ES225 | 5477 | M00085449B:G12 | B-30529 |
| ES225 | 5477 | M00085832D:G02 | B-30529 |
| ES225 | 5477 | M00085827C:F03 | B-30529 |
| ES225 | 5477 | M00086328B:G12 | B-30529 |
| ES225 | 5477 | M00085820D:D02 | B-30529 |
| ES225 | 5477 | M00085522C:E05 | B-30529 |
| ES225 | 5477 | M00086178A:D07 | B-30529 |
| ES225 | 5477 | M00085651A:A01 | B-30529 |
| ES225 | 5477 | M00085814B:G08 | B-30529 |
| ES225 | 5477 | M00086149A:F06 | B-30529 |
| ES225 | 5477 | M00085754C:A12 | B-30529 |
| ES225 | 5477 | M00085383C:C05 | B-30529 |
| ES225 | 5477 | M00086206C:C01 | B-30529 |
| ES225 | 5477 | M00085982D:C06 | B-30529 |
| ES225 | 5477 | M00085590B:F11 | B-30529 |
| ES225 | 5477 | M00086161B:H08 | B-30529 |
| ES225 | 5477 | M00086277B:E06 | B-30529 |
| ES225 | 5477 | M00085305B:F10 | B-30529 |
| ES225 | 5477 | M00086081B:A06 | B-30529 |
| ES225 | 5477 | M00086053B:F01 | B-30529 |
| ES225 | 5477 | M00085259A:H05 | B-30529 |
| ES225 | 5477 | M00083694C:F09 | B-30529 |
| ES225 | 5477 | M00085643D:F06 | B-30529 |
| ES225 | 5477 | M00086209B:H12 | B-30529 |
| ES225 | 5477 | M00085860B:D10 | B-30529 |
| ES225 | 5477 | M00086178D:H12 | B-30529 |
| ES225 | 5477 | M00085557B:B02 | B-30529 |
| ES225 | 5477 | M00086184C:C10 | B-30529 |
| ES225 | 5477 | M00086227B:E06 | B-30529 |
| ES225 | 5477 | M00085603A:E01 | B-30529 |
| ES225 | 5477 | M00086233D:A03 | B-30529 |
| ES225 | 5477 | M00085817D:C04 | B-30529 |
| ES225 | 5477 | M00086157D:D03 | B-30529 |
| ES225 | 5477 | M00085583A:E06 | B-30529 |
| ES225 | 5477 | M00086136C:B06 | B-30529 |
| ES225 | 5477 | M00085626B:B11 | B-30529 |
| ES225 | 5477 | M00086048D:H08 | B-30529 |
| ES225 | 5477 | M00086010B:B05 | B-30529 |
| ES225 | 5477 | M00083735C:H12 | B-30529 |
| ES225 | 5477 | M00083722B:A07 | B-30529 |
| ES225 | 5477 | M00085745C:C03 | B-30529 |
| ES225 | 5477 | M00085809A:C05 | B-30529 |
| ES225 | 5477 | M00085694D:D06 | B-30529 |
| ES225 | 5477 | M00085786D:G12 | B-30529 |
| ES225 | 5477 | M00085764B:H12 | B-30529 |
| ES225 | 5477 | M00086000C:B08 | B-30529 |
| ES225 | 5477 | M00085817B:B08 | B-30529 |
| ES225 | 5477 | M00085806B:A10 | B-30529 |
| ES225 | 5477 | M00086081D:D09 | B-30529 |
| ES225 | 5477 | M00085808C:E12 | B-30529 |
| ES225 | 5477 | M00085336C:G09 | B-30529 |
| ES225 | 5477 | M00085620B:D08 | B-30529 |
| ES225 | 5477 | M00085721A:G03 | B-30529 |
| ES225 | 5477 | M00086128D:H10 | B-30529 |
| ES225 | 5477 | M00085361A:A09 | B-30529 |
| ES225 | 5477 | M00085714C:G03 | B-30529 |
| ES225 | 5477 | M00085741C:D06 | B-30529 |
| ES225 | 5477 | M00085722A:A06 | B-30529 |
| ES225 | 5477 | M00083704C:C04 | B-30529 |
| ES225 | 5477 | M00085549D:G03 | B-30529 |
| ES225 | 5477 | M00086143B:B08 | B-30529 |
| ES225 | 5477 | M00085926C:C06 | B-30529 |
| ES225 | 5477 | M00085980A:G10 | B-30529 |
| ES225 | 5477 | M00085625B:F01 | B-30529 |
| ES225 | 5477 | M00086128A:D09 | B-30529 |
| ES225 | 5477 | M00085393D:F12 | B-30529 |
| ES225 | 5477 | M00085935D:H04 | B-30529 |
| ES225 | 5477 | M00086159D:D01 | B-30529 |
| ES225 | 5477 | M00085597C:C03 | B-30529 |
| ES225 | 5477 | M00085259D:B06 | B-30529 |
| ES225 | 5477 | M00086015D:G04 | B-30529 |
| ES225 | 5477 | M00085255D:B09 | B-30529 |
| ES225 | 5477 | M00083715A:B11 | B-30529 |
| ES225 | 5477 | M00085959B:D04 | B-30529 |
| ES225 | 5477 | M00085380B:E10 | B-30529 |
| ES225 | 5477 | M00085100A:A12 | B-30529 |
| ES225 | 5477 | M00085350D:G05 | B-30529 |
| ES225 | 5477 | M00086301A:D04 | B-30529 |
| ES225 | 5477 | M00085891D:E07 | B-30529 |
| ES225 | 5477 | M00085108A:C12 | B-30529 |
| ES225 | 5477 | M00085085C:D10 | B-30529 |
| ES225 | 5477 | M00085104C:A10 | B-30529 |
| ES225 | 5477 | M00084805D:E02 | B-30529 |
| ES225 | 5477 | M00084789D:B10 | B-30529 |
| ES225 | 5477 | M00085277D:C11 | B-30529 |
| ES225 | 5477 | M00085647A:E04 | B-30529 |
| ES225 | 5477 | M00085886C:F05 | B-30529 |
| ES225 | 5477 | M00085444C:C02 | B-30529 |
| ES225 | 5477 | M00085415A:D12 | B-30529 |
| ES225 | 5477 | M00085435A:B11 | B-30529 |
| ES225 | 5477 | M00085282C:F05 | B-30529 |
| ES225 | 5477 | M00084784B:A02 | B-30529 |
| ES225 | 5477 | M00085944A:F04 | B-30529 |
| ES225 | 5477 | M00085804B:F09 | B-30529 |
| ES225 | 5477 | M00085339C:C04 | B-30529 |
| ES225 | 5477 | M00085968B:F09 | B-30529 |
| ES225 | 5477 | M00084779D:H10 | B-30529 |
| ES225 | 5477 | M00085381C:A05 | B-30529 |
| ES225 | 5477 | M00084783C:G08 | B-30529 |
| ES225 | 5477 | M00085333B:B10 | B-30529 |
| ES225 | 5477 | M00085068B:A07 | B-30529 |
| ES225 | 5477 | M00084773C:H08 | B-30529 |
| ES225 | 5477 | M00086020C:E09 | B-30529 |
| ES225 | 5477 | M00085273B:F08 | B-30529 |
| ES225 | 5477 | M00085361D:F06 | B-30529 |
| ES225 | 5477 | M00084780C:F08 | B-30529 |
| ES225 | 5477 | M00085302C:B06 | B-30529 |
| ES225 | 5477 | M00085988D:F09 | B-30529 |
| ES225 | 5477 | M00083738C:D05 | B-30529 |
| ES225 | 5477 | M00085331C:C07 | B-30529 |
| ES225 | 5477 | M00085541C:F06 | B-30529 |
| ES225 | 5477 | M00086327B:D10 | B-30529 |
| ES225 | 5477 | M00085917C:A04 | B-30529 |
| ES225 | 5477 | M00086310A:F04 | B-30529 |
| ES225 | 5477 | M00085510C:A07 | B-30529 |
| ES225 | 5477 | M00085296D:H10 | B-30529 |
| ES225 | 5477 | M00086085A:G05 | B-30529 |
| ES225 | 5477 | M00085299B:G01 | B-30529 |
| ES225 | 5477 | M00085503D:G05 | B-30529 |
| ES225 | 5477 | M00085260C:A10 | B-30529 |
| ES225 | 5477 | M00086282A:B10 | B-30529 |
| ES225 | 5477 | M00085837C:H08 | B-30529 |
| ES225 | 5477 | M00085630B:B09 | B-30529 |
| ES225 | 5477 | M00086279D:C07 | B-30529 |
| ES225 | 5477 | M00085263C:F12 | B-30529 |
| ES225 | 5477 | M00086294B:E11 | B-30529 |
| ES225 | 5477 | M00086322A:E02 | B-30529 |
| ES225 | 5477 | M00085854C:E06 | B-30529 |
| ES225 | 5477 | M00086272D:H11 | B-30529 |
| ES225 | 5477 | M00085422D:D07 | B-30529 |
| ES225 | 5477 | M00085844C:H11 | B-30529 |
| ES225 | 5477 | M00085288C:C09 | B-30529 |
| ES225 | 5477 | M00085082C:B04 | B-30529 |
| ES225 | 5477 | M00085103D:H12 | B-30529 |
| ES225 | 5477 | M00086336B:A08 | B-30529 |
| ES225 | 5477 | M00084773C:F08 | B-30529 |
| ES225 | 5477 | M00085896D:A09 | B-30529 |
| ES225 | 5477 | M00085324B:F10 | B-30529 |
| ES225 | 5477 | M00085267B:D06 | B-30529 |
| ES225 | 5477 | M00085430C:E04 | B-30529 |
| ES225 | 5477 | M00085312C:B09 | B-30529 |
| ES225 | 5477 | M00085074B:A07 | B-30529 |
| ES225 | 5477 | M00085918D:C11 | B-30529 |
| ES225 | 5477 | M00085341C:H08 | B-30529 |
| ES225 | 5477 | M00084791D:D01 | B-30529 |
| ES225 | 5477 | M00085471B:H09 | B-30529 |
| ES225 | 5477 | M00085893B:D08 | B-30529 |
| ES225 | 5477 | M00084781A:A05 | B-30529 |
| ES226 | 5478 | M00084956B:B05 | B-30581 |
| ES226 | 5478 | M00084954D:D12 | B-30581 |
| ES226 | 5478 | M00084948B:F04 | B-30581 |
| ES226 | 5478 | M00084950D:F05 | B-30581 |
| ES226 | 5478 | M00084954D:E01 | B-30581 |
| ES226 | 5478 | M00084941D:C10 | B-30581 |
| ES226 | 5478 | M00084950D:A06 | B-30581 |
| ES226 | 5478 | M00084941D:H02 | B-30581 |
| ES226 | 5478 | M00084954C:B12 | B-30581 |
| ES226 | 5478 | M00084955A:E08 | B-30581 |
| ES226 | 5478 | M00084954D:A05 | B-30581 |
| ES226 | 5478 | M00084951A:D04 | B-30581 |
| ES226 | 5478 | M00084954C:A03 | B-30581 |

[0503] Retrieval of Individual Clones from Deposit of Pooled Clones. Where the biological deposit is composed of a pool of cDNA clones or a library of cDNA clones, the deposit was prepared by first transfecting each of the clones into separate bacterial cells. The clones in the pool or library were then deposited as a pool of equal mixtures in the composite deposit. Particular clones can be obtained from the composite deposit using methods well known in the art. For example, a bacterial cell containing a particular clone can be identified by isolating single colonies, and identifying colonies containing the specific clone through standard colony hybridization techniques, using an oligonucleotide probe or probes designed to specifically hybridize to a sequence of the clone insert (e.g., a probe based upon unmasked sequence of the encoded polynucleotide having the indicated SEQ ID NO). The probe should be designed to have a Tₘ of approximately 80° C. (assuming 2° C. for each A or T and 4° C. for each G or C). Positive colonies can then be picked, grown in culture, and the recombinant clone isolated. Alternatively, probes designed in this manner can be used to PCR to isolate a nucleic acid molecule from the pooled clones according to methods well known in the art, e.g., by purifying the cDNA from the deposited culture pool, and using the probes in PCR reactions to produce an amplified product having the corresponding desired polynucleotide sequence.

[0504] Those skilled in the art will recognize, or be able to ascertain, using not more than routine experimentation, many equivalents to the specific embodiments of the invention described herein. Such specific embodiments and equivalents are intended to be encompassed by the following claims.

[0505] All publications and patent applications cited in this specification are herein incorporated by reference as if each individual publication or patent application were specifically and individually indicated to be incorporated by reference. The citation of any publication is for its disclosure prior to the filing date and should not be construed as an admission that the present invention is not entitled to antedate such publication by virtue of prior invention.

[0506] Although the foregoing invention has been described in some detail by way of illustration and example for purposes of clarity of understanding, it is readily apparent to those of ordinary skill in the art in light of the teachings of this invention that certain changes and modifications may be made thereto without departing from the spirit or scope of the appended claims.

That which is claimed is:

1. An isolated polynucleotide comprising at least 15 contiguous nucleotides of a sequence selected from the group consisting of SEQ ID NOS:1, 3, 5, 7, 9, 11-13, 15, 16, 18, 20, 22, 24, 26, 27, 29 and 128-1618 and complements thereof.

2. A vector comprising the polynucleotide of claim 1.

3. A host cell comprising the vector of claim 2.

4. An isolated polynucleotide comprising at least 15 contiguous nucleotides of any one of SEQ ID NOS:1, 3, 5, 7, 9, 11-13, 15, 16, 18, 20, 22, 24, 26, 27, 29 and 128-1618 and which hybridizes under stringent conditions to a polynucleotide of a sequence selected from the group consisting of SEQ ID NOS:1, 3, 5, 7, 9, 11-13, 15, 16, 18, 20, 22, 24, 26, 27, 29 and 128-1618 and complements thereof.

5. An isolated polynucleotide comprising at least 15 contiguous nucleotides of either strand of a nucleotide sequence of an insert contained in a vector deposited as clone number XXX-YYY of ATCC Deposit Number ZZZ.

6. An isolated polynucleotide comprising at least 15 contiguous nucleotides of any one of SEQ ID NOS:1, 3, 5, 7, 9, 11-13, 15, 16, 18, 20, 22, 24, 26, 27, 29 and 128-1618, said polynucleotide obtained by amplifying a fragment of cDNA using at least one polynucleotide primer comprising at least 15 contiguous nucleotides of a nucleotide sequence selected from the group consisting of SEQ ID NOS:1, 3, 5, 7, 9, 11-13, 15, 16, 18, 20, 22, 24, 26, 27, 29 and 128-1618 and complements thereof.

7. A method for detecting a cancerous cell, said method comprising:
detecting a level of a gene product corresponding to any one of SEQ ID NOS:1, 3, 5, 7, 9, 11-13, 15, 16, 18, 20, 22, 24, 26, 27, 29 and 128-1618 and complements thereof, and
comparing the level of gene product to a control level of said gene product;
wherein the presence of a cancerous cell is indicated by detection of said level and comparison to a control level of gene product

8. The method of claim 7, wherein said cancerous cell is a cancerous breast, colon or prostate cell.

9. The method of claim 7, wherein said gene product is nucleic acid.

10. The method of claim 7, wherein said gene product is a polypeptide.

11. The method of claim 7, wherein said detecting step uses a polymerase chain reaction.

12. The method of claim 7, wherein said detecting step uses hybridization.

13. The method of claim 7, wherein said sample is a sample of tissue suspected of having cancerous cells.

14. A method for inhibiting a cancerous phenotype of a cell, said method comprising:
contacting a cancerous mammalian cell with an agent for inhibition of a gene product corresponding to any one of SEQ ID NOS:1, 3, 5, 7, 9, 11-13, 15, 16, 18, 20, 22, 24, 26, 27, 29 and 128-1618.

15. The method of claim 14, wherein said cancerous phenotype is aberrant cellular proliferation relative to a normal cell.

16. The method of claim 14, wherein said cancerous phenotype is loss of contact inhibition of cell growth.

17. The method of claims 14, wherein said agent is selected from the group consisting of a small molecule, an antibody, an antisense polynucleotide, and an RNAi molecule.

18. The method of claims 14, wherein said inhibition is associated with a reduction in a level of a gene product corresponding to any one of SEQ ID NOS:1, 3, 5, 7, 9, 11-13, 15, 16, 18, 20, 22, 24, 26, 27, 29 and 128-1618.

19. A method of treating a subject with cancer, said method comprising:
administering to a subject a pharmaceutically effective amount of an agent,
wherein said agent modulates the activity of a gene product corresponding to any one of SEQ ID NOS:113, 5, 7, 9, 11-13, 15, 16, 18, 20, 22, 24, 26, 27, 29 and 128-1618.

20. The method of claim 19, wherein said agent is selected from the group consisting of a small molecule, an antibody, an antisense polynucleotide, and an RNAi molecule.

21. A method for assessing the tumor burden of a subject, said method comprising:
detecting a level of a gene product corresponding to any one of SEQ ID NOS:1, 3, 5, 7, 9, 11-13, 15, 16, 18, 20, 22, 24, 26, 27, 29 and 128-1618 in a test sample from a subject,
wherein the level of said gene product in the test sample is indicative of the tumor burden in the subject.

22. A method for identifying an agent that modulates a biological activity of a gene product differentially expressed in a cancerous cell as compared to a normal cell, said method comprising:
contacting a candidate agent with a cell; and
detecting modulation of a biological activity of a gene product corresponding to any one of SEQ ID NOS:1, 3, 5, 7, 9, 11-13, 15, 16, 18, 20, 22, 24, 26, 27, 29 and 128-1618 relative to a level of biological activity of the same gene product in the absence of the candidate agent.

23. The method of claim 22, wherein said detecting is by assessing expression of said gene product.

24. The method of claim 23, wherein expression is assessed by detecting a polynucleotide gene product.

25. The method of claim 23, wherein expression is assessed by detecting a polypeptide gene product.

26. The method of claim 22, wherein said candidate agent is selected from the group consisting of a small molecule, an antibody, an antisense polynucleotide, and an RNAi molecule.

27. The method of claim 22, wherein said biological activity is modulation of a cancerous phenotype.

28. The method of claim 27, wherein said cancerous phenotype is abnormal cellular proliferation.

29. An isolated polypeptide encoded by any of SEQ ID NOS:1, 3, 5, 7, 9, 11-13, 15, 16, 18, 20, 22, 24, 26, 27, 29 and 128-1618, or fragment or variant thereof.

30. An isolated antibody that specifically binds to a polypeptide encoding by a polynucleotide consisting of a nucleotide sequence set forth in any one of SEQ ID NOS:1, 3, 5, 7, 9, 11-13, 15, 16, 18, 20, 22, 24, 26, 27, 29 and 128-1618 and complements thereof or a polypeptide having an amino acid sequence set forth in SEQ ID NOS: 2, 4, 6, 8, 10, 14, 17, 19, 21, 23, 25, 28 or 1619-1675.

31. An isolated polypeptide comprising at least 6 contiguous amino acids of SEQ ID NOS: 2, 4, 6, 8, 10, 14, 17, 19, 21, 23, 25, 28 or 1619-1675.

The application's sequence listing, which the Patent Office published only in electronic form, follows.

SEQUENCE LISTING (1681 sequences)

SEQ ID NO: 1 - DNA, 564 bp, H. sapiens
  CDS (21)...(396)
ggcgagatttgtgcggcgacatgaaactgcttacccacaatctgctgagctcgcatgtgcggggggtggggtcccgtggcttccccctgcgcctccaggccaccgaggtccgtatctgccctgtggaattcaaccccaacttcgtggcgcgtatgatacctaaagtggagtggtcggcgttcctggaggcggccgataacttgcgtctgatccaggtgccgaaagggccggttgagggatatgaggagaatgaggagtttctgaggaccatgcaccacctgctgctggaggtggaagtgatagagggcaccctgcagtgcccggaatctggacgtatgttccccatcagccgcgggatccccaacatgctgctgagtgaagaggaaactgagagttgattgtgccaggcgccagtttttcttgttatgactgtgtatttttgttgatctataccctgtttccgaattctgccgtgtgtatccccaacccttgacccaatgacaccaaacacagtgtttttgagctcggtattatatatttttttctcattaaaggtttaaaacc

SEQ ID NO: 2 - protein, 125 aa, H. sapiens
MKLLTHNLLSSHVRGVGSRGFPLRLQATEVRICPVEFNPNFVARMIPKVEWSAFLEAADNLRLIQVPKGPVEGYEENEEFLRTMHHLLLEVEVIEGTLQCPESGRMFPISRGIPNMLLSEEETES

SEQ ID NO: 3 - DNA, 919 bp, H. sapiens
  CDS (219)...(693)
tggcacgaggtggcacgagggtccgggtcgttgaggattaggctgctcgggcgtaaccggagctggggcgcggctgccaagggccggcccggaagtcccagcggtctttaaattctcccgtgctagggccagcctgcgcattcttacctgtcggggtgcggcgagtgtctcacctctctgcacttccaaggactcttgtcatctgccttaggcgggaaatgctgttgctggattgcaaccccgaggtggatggtctgaagcatttgctggagacaggggcctcggtcaacgcacccccggatccctgcaagcagtcgcctgtccacttagccgcaggaagcggccttgcttgctttcttctctggcagctgcaaacgggcgctgacctcaaccagcaggatgttttaggagaagctccactacacaaggcagcaaaagttggaagcctggagtgcctaagcctgcttgtagccagtgatgcccaaattgatttatgtaataagaacgggcaaacagctgaagatctcgcttggtcatgtggatttccagactgtgccaagtttcttacaacaattaaatgtatgcagacaataaaagcaagtgaacaccctgacaggaatgattgtgttgccgtgctcagacagaaacggagtctcggaagtgtagaaaataccagtgggaaaaggaagtgctgatgtcacgtgggttatgaagaagtctgaagaacgccttcatttcatgcaaatctataagctcctgcttttggctttaccatatgttgtgtctaatctccttctgagaaggacgaaaaactttcttccaagtgaagatccatttaagaacacatgtatttacatgcctataatatgctggttgtgtatgctttgtcttttaagttattaaaggaacgtctaaaaaa

SEQ ID NO: 4 - protein, 158 aa, H. sapiens
MLLLDCNPEVDGLKHLLETGASVNAPPDPCKQSPVHLAAGSGLACFLLWQLQTGADLNQQDVLGEAPLHKAAKVGSLECLSLLVASDAQIDLCNKNGQTAEDLAWSCGFPDCAKFLTTIKCMQTIKASEHPDRNDCVAVLRQKRSLGSVENTSGKRKC

SEQ ID NO: 5 - DNA, 1949 bp, H. sapiens
  CDS (5)...(1760)
caacatggcgccgtccacgccgctcttgacagtccgaggatcagaaggactgtacatggtgaatggaccaccacattttacagaaagcacagtgtttccaagggaatctgggaagaattgcaaagtctgtatctttagtaaggatgggaccttgtttgcctggggcaatggagaaaaagtaaatattatcagtgtcactaacaagggactactgcactccttcgacctcctgaaggcagtttgccttgaattctcacccaaaaatactgtcctggcaacgtggcagccttacactacttctaaagatggcacagctgggatacccaacctacaactttatgatgtgaaaactgggacatgtttgaaatctttcatccagaaaaaaatgcaaaattggtgtccatcctggtcagaagatgaaactctttgtgcccgcaatgttaacaatgaagttcacttctttgaaaacaacaattttaacacaattgcaaataaattgcatttgcaaaaaattaatgactttgtattatcacctggaccccaaccatacaaggtggctgtctatgttccaggaagtaaaggtgcaccttcatttgttagattatatcagtaccccaactttgctggacctcatgcagctttagctaataaaagtttctttaaggcagataaagttacaatgctgtggaataaaaaagctactgctgtgttggtaatagctagcacagatgttgacaagacaggagcttcctactatggagaacaaactctacactacattgcaacaaatggagaaagtgctgtagtgcaattaccaaaaaatggccccatttatgatgtagtttggaattctagttctactgagttttgtgctgtatatggttttatgcctgccaaagcgacaattttcaacttgaaatgtgatcctgtatttgactttggaactggtcctcgtaatgcagcctactatagccctcatggacatatattagtattagctggatttggaaatctgaggggacaaatggaagtgtgggatgtgaaaaactacaaacttatttctaaaccggtggcttctgattctacatattttgcttggtgcccggatggtgagcatattttaacagctacatgtgctcccaggttacgggttaataatggatacaaaatttggcattatactggctctatcttgcacaagtatgatgtgccatcaaatgcagaattatggcaggtttcttggcagccatttttggatggaatatttccagcaaaaacaataacttaccaagcagttccaagtgaagtacccaatgaggaacctaaagttgcaacagcttatagacccccagctttaagaaataaaccaatcaccaattccaaattgcatgaagaggaaccacctcagaatatgaaaccacaatcaggaaacgataagccattatcaaaaacagctcttaaaaatcaaaggaagcatgaagctaagaaagctgcaaagcaggaagcaagaagtgacaagagtccagatttggcacctactcctgccccacagagcacaccacgaaacactgtctctcagtcaatttctggggaccctgagatagacaaaaaaatcaagaacctaaagaagaaactgaaagcaatcgaacaactgaaagaacaagcagcaactggaaaacagctagaaaaaaatcagttggagaaaattcagaaagaaacagcccttctccaggagctggaagatttggaattgggtatttaaagattcacggaaagcaagttgatgaccagaaatcagtgcaaacacatcttctgttaaacccattggtatacacagaatattcctgtgcccacacttaatgtcaatctataattttaaccatttatccaagattctactaagtgtaaaattatttaataatgtctattaaattgatatttatatcttg

SEQ ID NO: 6 - protein, 585 aa, H. sapiens
MAPSTPLLTVRGSEGLYMVNGPPHFTESTVFPRESGKNCKVCIFSKDGTLFAWGNGEKVNIISVTNKGLLHSFDLLKAVCLEFSPKNTVLATWQPYTTSKDGTAGIPNLQLYDVKTGTCLKSFIQKKMQNWCPSWSEDETLCARNVNNEVHFFENNNFNTIANKLHLQKINDFVLSPGPQPYKVAVYVPGSKGAPSFVRLYQYPNFAGPHAALANKSFFKADKVTMLWNKKATAVLVIASTDVDKTGASYYGEQTLHYIATNGESAVVQLPKNGPIYDVVWNSSSTEFCAVYGFMPAKATIFNLKCDPVFDFGTGPRNAAYYSPHGHILVLAGFGNLRGQMEVWDVKNYKLISKPVASDSTYFAWCPDGEHILTATCAPRLRVNNGYKIWHYTGSILHKYDVPSNAELWQVSWQPFLDGIFPAKTITYQAVPSEVPNEEPKVATAYRPPALRNKPITNSKLHEEEPPQNMKPQSGNDKPLSKTALKNQRKHEAKKAAKQEARSDKSPDLAPTPAPQSTPRNTVSQSISGDPEIDKKIKNLKKKLKAIEQLKEQAATGKQLEKNQLEKIQKETALLQELEDLELGI

SEQ ID NO: 7 - DNA, 1110 bp, H. sapiens
  CDS (78)...(642)
tagtgggccccagtgttgcgctctctggccgttccttacactttgcttcaggctccagtgcaggggcgtagtgggatatggccaactcgggctgcaaggacgtcacgggtccagatgaggagagttttctgtactttgcctacggcagcaacctgctgacagagaggatccacctccgaaacccctcggcggcgttcttctgtgtggcccgcctgcaggattttaagcttgactttggcaattcccaaggcaaaacaagtcaaacttggcatggagggatagccaccatttttcagagtcctggcgatgaagtgtggggagtagtatggaaaatgaacaaaagcaatttaaattctctggatgagcaagaaggggttaaaagtggaatgtatgttgtaatagaagttaaagttgcaactcaagaaggaaaagaaataacctgtcgaagttatctgatgacaaattacgaaagtgctcccccatccccacagtataaaaagattatttgcatgggtgcaaaagaaaatggtttgccgctggagtatcaagagaagttaaaagcaatagaaccaaatgactatacaggaaaggtctcagaagaaattgaagacatcatcaaaaagggggaaacacaaactctttagaacataacagaatatatctaagggtattctatgtgctaatataaaatatttttaacacttgagaacagggatctgggggatctccacgtttgatccattttcagcagtgctctgaaggagtatcttacttgggtgattccttgtttttagactataaaaagaaactgggataggagttagacaatttaaaaggggtgtatgagggcctgaaatatgtgacaaatgaatgtgagtaccccttctgtgaacactgaaagctattctcttgaattgatcttaagtgtctccttgctctggtaaaagatagatttgtagctcacttgatgatggtgctggtgaattgctctgctctgtctgagatttttaaaaatcagcttaatgagagtaatctgcagacaattgataataacattttgaaaattggaaagatggtatactgtttttagaggaataaacgtatttgtgg

SEQ ID NO: 8 - protein, 188 aa, H. sapiens
MANSGCKDVTGPDEESFLYFAYGSNLLTERIHLRNPSAAFFCVARLQDFKLDFGNSQGKTSQTWHGGIATIFQSPGDEVWGVVWKMNKSNLNSLDEQEGVKSGMYVVIEVKVATQEGKEITCRSYLMTNYESAPPSPQYKKIICMGAKENGLPLEYQEKLKAIEPNDYTGKVSEEIEDIIKKGETQTL

SEQ ID NO: 9 - DNA, 965 bp, H. sapiens
  CDS (79)...(232)
gtagtgggccccagtgttgcgctctctggccgttccttacactttgcttcaggctccagtgcaggggcgtagtgggatatggccaactcgggctgcaaggacgtcacgggtccagatgaggagagttttctgtactttgcctacggcagcaacctgctgacagagaggatccacctccgaaacccctcggcggcgttcttctgtgtggcccgcctgcaggcaagaaggggttaaaagtggaatgtatgttgtaatagaagttaaagttgcaactcaagaaggaaaagaaataacctgtcgaagttatctgatgacaaattacgaaagtgctcccccatccccacagtataaaaagattatttgcatgggtgcaaaagaaaatggtttgccgctggagtatcaagagaagttaaaagcaatagaaccaaatgactatacaggaaaggtctcagaagaaattgaagacatcatcaaaaagggggaaacacaaactctttagaacataacagaatatatctaagggtattctatgtgctaatataaaatatttttaacacttgagaacagggatctgggggatctccacgtttgatccattttcagcagtgctctgaaggagtatcttacttgggtgattccttgtttttagactataaaaagaaactgggataggagttagacaatttaaaaggggtgtatgagggcctgaaatatgtgacaaatgaatgtgagtaccccttctgtgaacactgaaagctattctcttgaattgatcttaagtgtctccttgctctggtaaaagatagatttgtagctcacttgatgatggtgctggtgaattgctctgctctgtctgagatttttaaaaatcagcttaatgagagtaatctgcagacaattgataataacattttgaaaattggaaagatggtatactgtttttagaggaataaacgtatttgtgg

SEQ ID NO: 10 - protein, 51 aa, H. sapiens
MANSGCKDVTGPDEESFLYFAYGSNLLTERIHLRNPSAAFFCVARLQARRG

SEQ ID NO: 11 - DNA, 658 bp, H. sapiens
tcgagaggagctgacagccttcctgcaccccgaggagtgaggtgggccactgggtgctgccccctgcccaggaccagcccctggtggaagccaaccacctgctgcacgagagcgacacggacaaggacgggcggctgagcaaagcggaaatcctgggtaattggaacatgtttgtgggcagtcaggccaccaactatggtgaggacctgacccggcaccacgatgagctgtgagccccgcgcacctgccacagcctcagaggcccgcacaatgaccggaggaggggccgctgtggtctggccccctccctgtccaggccccgcaggaggcagatgcagtcccaggcatcctcctgcccctgggctctcagggaccccctgggtcggcttctgtccctgtcacacccccaaccccagggaggggctgtcatagtcccagaggataagcaatacctatttctgactgagtctcccagcccagacccagggaccctggccccaagctcagctctaagaaccgccaccaacccctccagctccaaatctgagcctccaccacatagactgaaactcccctggccccagccctctcctgcctggcctggcctgggacacctcctctctgccaggaggcaataaaagccagcgccgggaccttg

SEQ ID NO: 12 - DNA, 1507 bp, H. sapiens
  misc_feature 1047, 1301: n = A,T,C or G
ggaacgcagagcggagcgtggagagcggagcgaagctggataacaggggaccgatgatgtggcgaccatcagttctgctgcttctgttgctactgaggcacggggcccaggggaagccatccccagacgcaggccctcatggccaggggagggtgcaccaggcggcccccctgagcgacgctccccatgatgacgcccacgggaacttccagtacgaccatgaggctttcctgggacgggaagtggccaaggaattcgaccaactcaccccagaggaaagccaggcccgtctggggcggatcgtggaccgcatggaccgcgcgggggacggcgacggctgggtgtcgctggccgagcttcgcgcgtggatcgcgcacacgcagcagcggcacatacgggactcggtgagcgcggcctgggacacgtacgacacggaccgcgacgggcgtgtgggttgggaggagctgcgcaacgccacctatggccactacgcgcccggtgaagaatttcatgacgtggaggatgcagagacctacaaaaagatgctggctcgggacgagcggcgtttccgggtggccgaccaggatggggactcgatggccactcgagaggagctgacagccttcctgcaccccgaggagttccctcacatgcgggacatcgtgattgctgaaaccctggaggacctggacagaaacaaagatggctatgtccaggtggaggagtacatcgcggatctgtactcagccgagcctggggaggaggagccggcgtgggtgcagacggagaggcagcagttccgggacttccgggatctgaacaaggatgggcacctggatgggagtgaggtgggccactgggtgctgccccctgcccaggaccagcccctggtggaagccaaccacctgctgcacgaragcgacacggacaaggaygggcggctgagcaaagcgsaaatcctgggtaattggaacatgtttgtgggcagtcaggccaccaactatggygaggacctgacccggcaccacgatgagctgtgagcmccgngcacctgccacagcctcagaggcccgcacaatgaccggaggaggggccgctgtggtctggccccctccctgtccaggccccgcaggaggcagatgcagtcccaggcatcctcctkcccctgggctctcagggaccccctgggtcggcttctgtccctgtcacacccccaaccccagggaggggctgtcatagtcccagaggataagcaatacctatttctgactgagtctcccagcccagacccagggaccctnggccccaagctcagctctaagaaccgccccaacccctccagctccaaatctgagcctccaccacatagactgaaactcccctggccccagccctctcctgcctggcctggcctgggacacctcctctctgccaggaggcaataaaagccagcgccgggaaaaaaaaaaaaaaaaaaaaaaaaaaaaaaaaaaaaaaaaaaaaaaan

SEQ ID NO: 13 - DNA, 661 bp, H. sapiens
  CDS (79)...(376)
ggcgcggtgcagggctcttaagaacgaacggcttgggcgcggactggtatccggggactgtgacttgcagggtccgccatggagccagagcagatgctggagggacaaacgcaggttgcagaaaatcctcactctgagtacggtctcacagacaacgttgagagaatagtagaaaatgagaagattaatgcagaaaagtcatcaaagcagaaggtagatctccagtctttgccaactcgtgcctacctggatcagacagttgtgcctatcttattacagggacttgctgtgcttgcaaaggaaagaccaccaaatcccattgaatttctagcatcttatcttttaaaaaacaaggcacagtttgaagatcgaaactgacttaatgggaagaacagaaaaatttagttgctactgtagatttacatgattaagaggcagctttaattgccatgatcattccctctttttggatgtataagaaccttccggacaacagaacctatttctggaattgcagaagataacatatttcccttattttgatttaatcaccataaaccatacctatttaatgagtgtattctgtgcaatttttttctcagattgtctttaactttgtttttaaaatgaccttcaaaataaactgtcaaaacaccattat

SEQ ID NO: 14 - protein, 99 aa, H. sapiens
MEPEQMLEGQTQVAENPHSEYGLTDNVERIVENEKINAEKSSKQKVDLQSLPTRAYLDQTVVPILLQGLAVLAKERPPNPIEFLASYLLKNKAQFEDRN

SEQ ID NO: 15 - DNA, 1507 bp, H. sapiens; identical to SEQ ID NO: 12
  misc_feature 1047, 1301: n = A,T,C or G

SEQ ID NO: 16 - DNA, 716 bp, H. sapiens
  CDS (16)...(538)
ctcgatcgaagcgagatggcggacgtgctagatcttcacgaggctgggggcgaagatttcgccatggatgaggatggggacgagagcattcacaaactgaaagaaaaagcgaagaaacggaagggtcgcggctttggctccgaagaggggtcccgagcgcggatgcgtgaggattatgacagcgtggagcaggatggcgatgaacccggaccacaacgctctgttgaaggctggattctctttgtaactggagtccatgaggaagccaccgaagaagacatacacgacaaattcgcagaatatggggaaattaaaaacattcatctcaacctcgacaggcgaacaggatatctgaaggggtatactctagttgaatatgaaacatacaaggaagcccaggctgctatggagggactcaatggccaggatttgatgggacagcccatcagcgttgactggtgttttgttcggggtccaccaaaaggcaagaggagaggtggccgaagacgcagcagaagtccagaccggagacgtcgctgacaggtcctctgttgtccaggtgttctcttcaagattccatttgaccatgcagccttggacaaataggactggggtggaacttgctgtgtttatatttaatctcttaccgtatatgcgtagtatttgagttgcgaataaatgttccattttgttttctacaaaaaaaaaaaaaaaaa

SEQ ID NO: 17 - protein, 174 aa, H. sapiens
MADVLDLHEAGGEDFAMDEDGDESIHKLKEKAKKRKGRGFGSEEGSRARMREDYDSVEQDGDEPGPQRSVEGWILFVTGVHEEATEEDIHDKFAEYGEIKNIHLNLDRRTGYLKGYTLVEYETYKEAQAAMEGLNGQDLMGQPISVDWCFVRGPPKGKRRGGRRRSRSPDRRRR

SEQ ID NO: 18 - DNA, 763 bp, H. sapiens
  CDS (2)...(551)
catggccaagccgtgtggggtgcgcctgagcggggaagcccgcaaacaggtggaggtcttcagacagaatcttttccaggaggctgaggaattcctctacagattcttgccacagaaaatcatatacctgaatcagctcttgcaagaggactccctcaatgtggctgacttgacttccctccgggccccactggacatccccatcccagaccctccacccaaggatgatgagatggaaacagataagcaggagaagaaagaagtccctaagtgtggatttctccctgggaatgagaaagtcctgtccctgcttgccctggttaagccagaagtctggactctcaaagagaaatgcattctggtgattacatggatccaacacctgatccccaagattgaagatggaaatgattttggggtagcaatccaggagaaggtgctggagagggtgaatgccgtcaagaccaaagtgaagctttccagacaaccatttccaagtacttctcagaacgtggggatgctgtggccaaggcctccaaggagactcatgtaatggattaccgggccttggtgcatgagcgagatgaggcagcctatggggagctcagggccatggtgctggacctgagggccttctatgctgagctttatcatatcatcagcagcaacctggagaaaattgtcaacccaaagggtgaagaaaagccatctatgtactgaacccgggactagaaggaaaataaatgatctatatgttgtgtgg

SEQ ID NO: 19 - protein, 183 aa, H. sapiens
MAKPCGVRLSGEARKQVEVFRQNLFQEAEEFLYRFLPQKIIYLNQLLQEDSLNVADLTSLRAPLDIPIPDPPPKDDEMETDKQEKKEVPKCGFLPGNEKVLSLLALVKPEVWTLKEKCILVITWIQHLIPKIEDGNDFGVAIQEKVLERVNAVKTKVKLSRQPFPSTSQNVGMLWPRPPRRLM

SEQ ID NO: 20 - DNA, 790 bp, H. sapiens
  CDS (240)...(585)
acgttttacagtctttaattaagcacataaaactgtactatttaatatatttctccatgaactttttgtgaaattcagatcgcagtgtgtcatttacaaatcttttgtctttcttctggtcatctacaccttttgcacagttcttgaagacaacgtcatcatcccaccttcttttaactttgaagttggcctgaggctgggatgggccagtgagattaaggagagggtttccgctcagaatgttttccatacgaatcctctcttcttcagctttttgttcttgttccttcctggcctgctcttcagctctttcttttttaattttttccagttctgcaagaagagctgcagtatcatcatcatcactttcttcttcaaaatcttcatcttcctcatctgttagagggtcatctgcatcaaggttggcggcaggaatctggtctaaccgtggcttttttgacactgaagaggaggttgtatgttctcgggttggacgatccctatttttctctcttgcagcagctctctctctttcttccaactctctcctgaagtcacggttacgaacctcttcaggggcatcctgagtagtctgtctgtattttatctttgtatgagagggtaggtctctgcttgaatactgctttgaaagttggctcaaatcaccttctccttttccccttccacctctggcaggttcaaaggttggcctggctgctgttgtcatcttttatgactggccgaggtccgatgcagcaggctccgaagatcatacagacgccattaccac

SEQ ID NO: 21 - protein, 115 aa, H. sapiens
MFSIRILSSSAFCSCSFLACSSALSFLIFSSSARRAAVSSSSLSSSKSSSSSSVRGSSASRLAAGIWSNRGFFDTEEEVVCSRVGRSLFFSLAAALSLSSNSLLKSRLRTSSGAS

SEQ ID NO: 22 - DNA, 1939 bp, H. sapiens
  CDS (53)...(1700)
gtggcgccagcggaggcaggttgctgtgtttgtgcttccttctacagccaatatgaaaaggcctaagttaaagaaagcaagtaaacgcatgacctgccataagcggtataaaatccaaaaaaaggttcgagaacatcatcgaaaattaagaaaggaggctaaaaagcagggtcacaagaagcctaggaaagacccaggagttccaaacagtgctccctttaaggaggctcttcttagggaagctgagctaaggaaacagaggcttgaagaactaaaacagcagcagaaacttgacaggcagaaggaactagaaaagaaaagaaaacttgaaactaatcctgatattaagccatcaaatgtggaacctatggaaaaggagtttgggctttgcaaaactgagaacaaagccaagtcgggcaaacagaattcaaagaagctgtactgccaagaacttaaaaaggtgattgaagcctccgatgttgtcctagaggtgttggatgccagagatcctcttggttgcagatgtcctcaggtagaagaggccattgtccagagtggacagaaaaagctggtacttatattaaataaatcagatctggtaccaaaggagaatttggagagctggctaaattatttgaagaaagaattgccaacagtggtgttcagagcctcaacaaaaccaaaggataaagggaagataaccaagcgtgtgaaggcaaagaagaatgctgctccattcagaagtgaagtctgctttgggaaagagggcctttggaaacttcttggaggttttcaggaaacttgcagcaaagccattcgggttggagtaattggtttcccaaatgtggggaaaagcagcattatcaatagcttaaaacaagaacagatgtgtaatgttggtgtatccatggggcttacaaggagcatgcaagttgtccccttggacaaacagatcacaatcatagatagtccgagcttcatcgtatctccacttaattcctcctctgcgcttgctctgcgaagtccagcaagtattgaagtagtaaaaccgatggaggctgccagtgccatcctttcccaggctgatgctcgacaggtagtactgaaatatactgtcccaggctacaggaattctctggaattttttactatgcttgctcagagaagaggtatgcaccaaaaaggtggaatcccaaatgttgaaggtgctgccaaactgctgtggtctgagtggacaggtgcctcattagcttactattgccatccccctacatcttggactcctcctccatattttaatgagagtattgtggtagacatgaaaagcggcttcaatctggaagaactggaaaagaacaatgcacagagcataagagccatcaagggccctcatttggccaatagcatccttttccagtcttccggtctgacaaatggaataatagaagaaaaggacatacatgaagaattgccaaaacggaaagaaaggaagcaggaggagagggaggatgacaaagacagtgaccaggaaactgttgatgaagaagttgatgaaaacagctcaggcatgtttgctgcagaagagacaggggaggcactgtctgaggagactacagcaggtgaacagtctacaaggtcttttatcttggataaaatcattgaagaggatgatgcttatgacttcagtacagattatgtgtaacagaacaatggctttttatgatttttttttttaacattttaagcagactgctaaactgttctctgtataagttatggtatgcatgagctgtgtaaattttgtgaatatgtattatattaaaaccaggcaacttggaatccctaaattctgtaaaaagacaattcatctcattgtgagtggaagtagttatctggaataaaaaaagaagatacctattgaaaaaaaaaaaaaaaaaaa

SEQ ID NO: 23 - protein, 549 aa, H. sapiens
MKRPKLKKASKRMTCHKRYKIQKKVREHHRKLRKEAKKQGHKKPRKDPGVPNSAPFKEALLREAELRKQRLEELKQQQKLDRQKELEKKRKLETNPDIKPSNVEPMEKEFGLCKTENKAKSGKQNSKKLYCQELKKVIEASDVVLEVLDARDPLGCRCPQVEEAIVQSGQKKLVLILNKSDLVPKENLESWLNYLKKELPTVVFRASTKPKDKGKITKRVKAKKNAAPFRSEVCFGKEGLWKLLGGFQETCSKAIRVGVIGFPNVGKSSIINSLKQEQMCNVGVSMGLTRSMQVVPLDKQITIIDSPSFIVSPLNSSSALALRSPASIEVVKPMEAASAILSQADARQVVLKYTVPGYRNSLEFFTMLAQRRGMHQKGGIPNVEGAAKLLWSEWTGASLAYYCHPPTSWTPPPYFNESIVVDMKSGFNLEELEKNNAQSIRAIKGPHLANSILFQSSGLTNGIIEEKDIHEELPKRKERKQEEREDDKDSDQETVDEEVDENSSGMFAAEETGEALSEETTAGEQSTRSFILDKIIEEDDAYDFSTDYV

SEQ ID NO: 24 - DNA, 503 bp, H. sapiens
  CDS (10)...(400)
ggccacgtaatgtccgtagttcgctcatccgtccatgccagatggattgtggggaaggtgattgggacaaaaatgcaaaagactgctaaagtgagagtgaccaggcttgttctggatccctatttattaaagtattttaataagcggaaaacctactttgctcacgatgcccttcagcagtgcacagttggggatattgtgcttctcagagctttacctgttccacgagcaaagcatgtgaaacatgaactggctgagatcgttttcaaagttggaaaagtcatagatccagtgacaggaaagccctgtgctggaactacctacctggagagtccgttgagttcggaaaccacccagctaagcaaaaatctggaagaactcaatatctcttcagcacagtgaagcgggagtggaagaaggatctgaagggaaaaactgacatgtttatgttatggaaaaagaaatttttctaagtttcatcacaaaaaaaaaaaaaaaaaaaa

SEQ ID NO: 25 - protein, 130 aa, H. sapiens
MSVVRSSVHARWIVGKVIGTKMQKTAKVRVTRLVLDPYLLKYFNKRKTYFAHDALQQCTVGDIVLLRALPVPRAKHVKHELAEIVFKVGKVIDPVTGKPCAGTTYLESPLSSETTQLSKNLEELNISSAQ

SEQ ID NO: 26 - DNA, 651 bp, H. sapiens
ggaattcggcacgaggtcgactcctgtgaggtatggtgctgggtgcagatgcagtgtggctctggatagcaccttatggacagttgtgtccccaaggaaggatgagaatagctactgaagtcctaaagagcaagcctaactcaagccattggcacacaggcattagacagaaagctggaagttgaaatggtggagtccaacttgcctggaccagcttaatggttctgctcctggtaacgtttttatccatggatgacttgcttgggtaaggacatgaagacagttcctgtcataccttttaaaggtatggagagtcggcttgactacactgtgtggagcaagttttaaagaagcaaaggactcagaattcatgattgaagaaatgcaggcagacctgttatcctaaactagggtttttaatgaccacaacaagcaagcatgcagcttactgcttgaaagggtcttgcctcacccaagctagagtgcagtggcctttgaagcttactacagcctcaaacttctgggctcaagtgatcctcagcctcccagtggtctttgtagactgcctgatggagtctcatggcacaagaagattaaaacagtgtctccaattttaataaatttttgcaatccaaaaaaaaaaaaaaaaaa

SEQ ID NO: 27 - DNA, 559 bp, H. sapiens
  CDS (324)...(519)
ggctctggatagcaccttatggacagttgtgtccccaaggaaggatgagaatagctactgaagtcctaaagagcaagcctaactcaagccattggcacacaggcattagacagaaagctggaagttgaaatggtggagtccaacttgcctggaccagcttaatggttctgctcctggtaacgtttttatccatggatgacttgcttgggtatggagagtcggcttgactacactgtgtggagcaagttttaaagaagcaaaggactcagaattcatgattgaagaaatgcaggcagacctgttatcctaaactagggtttttaatgaccacaacaagcaagcatgcagcttactgcttgaaagggtcttgcctcacccaagctagagtgcagtggcctttgaagcttactacagcctcaaacttctgggctcaagtgatcctcagcctcccagtggtctttgtagactgcctgatggagtctcatggcacaagaagattaaaacagtgtctccaattttaataaatttttgcaatccaaaaaaaaaaaaaaaaaaaaaa

SEQ ID NO: 28 - protein, 65 aa, H. sapiens
MTTTSKHAAYCLKGSCLTQARVQWPLKLTTASNFWAQVILSLPVVFVDCLMESHGTRRLKQCLQF

SEQ ID NO: 29 - DNA, 623 bp, H. sapiens
  primer sequence
tcgagcggccgcccgggcaggtgtcgactcctgtgaggtatggtgctgggtgcagatgcagtgtggctctggatagcaccttatggacagttgtgtccccaaggaaggatgagaatagctactgaagtcctaaagagcaagcctaactcaagccattggcacacaggcattagacagaaagctggaagttgaaatggtggagtccaacttgcctggaccagcttaatggttctgctcctggtaacgtttttatccatggatgacttgcttgggtatggagagtcggcttgactacactgtgtggagcaagttttaaagaagcaaaggactcagaattcatgattgaagaaatgcaggcagacctgttatcctaaactagggtttttaatgaccacaacaagcaagcatgcagcttactgcttgaaagggtcttgcctcacccaagctagagtgcagtggcctttgaagcttactacagcctcaaacttctgggctcaagtgatcctcagcctcccagtggtctttgtagactgcctgatggagtctcatggcacaagaagattaaaacagtgtctccaattttaataaatttttgcaatccaaaaaaaaaaaaaaaaaaaaaa

SEQ ID NO: 30 - DNA, 23 bp, Artificial Sequence
  Primer
aggagtttctgaggaccatgcac

SEQ ID NO: 31 - DNA, 22 bp, Artificial Sequence
  Primer
tcaagggttggggatacacacg

SEQ ID NO: 32 - DNA, 22 bp, Artificial Sequence
  primer sequence
cttgcttgctttcttctctggc

SEQ ID NO: 33 - DNA, 24 bp, Artificial Sequence
  primer sequence
agtctggaaatccacatgaccaag

SEQ ID NO: 34 - DNA, 23 bp, Artificial Sequence
  primer sequence
cccaatgaggaacctaaagttgc

SEQ ID NO: 35 - DNA, 23 bp, Artificial Sequence
  primer sequence
ggtgccaaatctggactcttgtc

SEQ ID NO: 36 - DNA, 23 bp, Artificial Sequence
  Primer
gatccattttcagcagtgctctg

SEQ ID NO: 37 - DNA, 25 bp, Artificial Sequence
  Primer
cagtgttcacagaaggggtactcac

SEQ ID NO: 38 - DNA, 20 bp, Artificial Sequence
  Primer
acgagagcgacacggacaag

SEQ ID NO: 39 - DNA, 20 bp, Artificial Sequence
  Primer
tctgaggctgtggcaggtgc

SEQ ID NO: 40 - DNA, 21 bp, Artificial Sequence
  Primer
ccagtctttgccaactcgtgc

SEQ ID NO: 41 - DNA, 23 bp, Artificial Sequence
  primer sequence
ttcgatcttcaaactgtgccttg

SEQ ID NO: 42 - DNA, 20 bp, Artificial Sequence
  Primer
ttggcaaccagaccagcatc

SEQ ID NO: 43 - DNA, 22 bp, Artificial Sequence
  Primer
tttcccataggtgtgagtggcg

SEQ ID NO: 44 - DNA, 22 bp, Artificial Sequence
  Primer
gactggtgttttgttcggggtc

SEQ ID NO: 45 - DNA, 21 bp, Artificial Sequence
  Primer
tttgtccaaggctgcatggtc

SEQ ID NO: 46 - DNA, 22 bp, Artificial Sequence
  Primer
tgccctggttaagccagaagtc

SEQ ID NO: 47 - DNA, 22 bp, Artificial Sequence
  Primer
agcttcactttggtcttgacgg

SEQ ID NO: 48 - DNA, 22 bp, Artificial Sequence
  Primer
ggtcatctgcatcaaggttggc

SEQ ID NO: 49 - DNA, 22 bp, Artificial Sequence
  Primer
ggttcgtaaccgtgacttcagg

SEQ ID NO: 50 - DNA, 21 bp, Artificial Sequence
  Primer
gcatccttttccagtcttccg

SEQ ID NO: 51 - DNA, 20 bp, Artificial Sequence
  Primer
tgcagcaaacatgcctgagc

SEQ ID NO: 52 - DNA, 22 bp, Artificial Sequence
  Primer
tgttccacgagcaaagcatgtg

SEQ ID NO: 53 - DNA, 22 bp, Artificial Sequence
  Primer
atccttcttccactcccgcttc

SEQ ID NO: 54 - DNA, 22 bp, Artificial Sequence
  Primer
tcggcttgactacactgtgtgg

SEQ ID NO: 55 - DNA, 22 bp, Artificial Sequence
  Primer
tacaaagaccactgggaggctg

SEQ ID NO: 56 - DNA, 24 bp, Artificial Sequence
  Primer
cgggaaatcgtgcgtgacattaag

SEQ ID NO: 57 - DNA, 24 bp, Artificial Sequence
  Primer
tgatctccttctgcatcctgtcgg

SEQ ID NO: 58 - DNA, 21 bp, Artificial Sequence
  Primer
tttggctacagcaacagggtg

SEQ ID NO: 59 - DNA, 22 bp, Artificial Sequence
  Primer
tgtgaggaggggagattcagtg

SEQ ID NO: 60 - DNA, 16 bp, Artificial Sequence
  Primer
cgctgacctcaaccag

SEQ ID NO: 61 - DNA, 21 bp, Artificial Sequence
  Primer
ctgtttgcccgttcttattac

SEQ ID NO: 62 - DNA, 24 bp, Artificial Sequence
  Primer
cgggaaatcgtgcgtgacattaag

SEQ ID NO: 63 - DNA, 24 bp, Artificial Sequence
  Primer
tgatctccttctgcatcctgtcgg

SEQ ID NO: 64 - DNA, 25 bp, Artificial Sequence
  Antisense oligonucleotide
atttgggcatcactggctacaagca

SEQ ID NO: 65 - DNA, 25 bp, Artificial Sequence
  Reverse control oligonucleotide
acgaacatcggtcactacgggttta

SEQ ID NO: 66 - DNA, 24 bp, Artificial Sequence
  Antisense oligonucleotide
cagagaggtgagacactcgccgca

SEQ ID NO: 67 - DNA, 24 bp, Artificial Sequence
  Reverse control oligonucleotide
acgccgctcacagagtggagagac

SEQ ID NO: 68 - DNA, 25 bp, Artificial Sequence
  Synthetic oligonucleotide
ttggtgtcattgggtcaagggttgg

SEQ ID NO: 69 - DNA, 25 bp, Artificial Sequence
  Synthetic oligonucleotide
ggttgggaactgggttactgtggtt

SEQ ID NO: 70 - DNA, 24 bp, Artificial Sequence
  Synthetic oligonucleotide
acagggcagatacggacctcggtg

SEQ ID NO: 71 - DNA, 24 bp, Artificial Sequence
  Synthetic oligonucleotide
gtggctccaggcatagacgggaca

SEQ ID NO: 72 - DNA, 25 bp, Artificial Sequence
  Synthetic oligonucleotide
ttgtgggtaagcagtttcatgtcgc

SEQ ID NO: 73 - DNA, 25 bp, Artificial Sequence
  Synthetic oligonucleotide
cgctgtactttgacgaatgggtgtt

SEQ ID NO: 74 - DNA, 25 bp, Artificial Sequence
  Synthetic oligonucleotide
cctggatcagacgcaagttatcggc

SEQ ID NO: 75 - DNA, 25 bp, Artificial Sequence
  Synthetic oligonucleotide
cggctattgaacgcagactaggtcc

SEQ ID NO: 76 - DNA, 25 bp, Artificial Sequence
  Synthetic oligonucleotide
ctactccccacacttcatcgccagg

SEQ ID NO: 77 - DNA, 25 bp, Artificial Sequence
  Synthetic oligonucleotide
ggaccgctacttcacacccctcatc

SEQ ID NO: 78 - DNA, 25 bp, Artificial Sequence
  Synthetic oligonucleotide
ctcttgatactccagcggcaaacca

SEQ ID NO: 79 - DNA, 25 bp, Artificial Sequence
  Synthetic oligonucleotide
accaaacggcgacctcatagttctc

SEQ ID NO: 80 - DNA, 24 bp, Artificial Sequence
  Synthetic oligonucleotide
gcgcccaagccgttcgttcttaag

SEQ ID NO: 81 - DNA, 24 bp, Artificial Sequence
  Synthetic oligonucleotide
gaattcttgcttgccgaacccgcg

SEQ ID NO: 82 - DNA, 25 bp, Artificial Sequence
  Synthetic oligonucleotide
ccaggtaggcacgagttggcaaaga

SEQ ID NO: 83 - DNA, 25 bp, Artificial Sequence
  Synthetic oligonucleotide
agaaacggttgagcacggatggacc

SEQ ID NO: 84 - DNA, 25 bp, Artificial Sequence
  Synthetic oligonucleotide
gccattgaagatgcccagatcccac

SEQ ID NO: 85 - DNA, 25 bp, Artificial Sequence
  Synthetic oligonucleotide
caccctagacccgtagaagttaccg

SEQ ID NO: 86 - DNA, 24 bp, Artificial Sequence
  Synthetic oligonucleotide
cctgcgtttgtccctccagcatct

SEQ ID NO: 87 - DNA, 24 bp, Artificial Sequence
  Synthetic oligonucleotide
tctacgacctccctgtttgcgtcc

SEQ ID NO: 88 - DNA, 25 bp, Artificial Sequence
  Synthetic oligonucleotide
aagtcacagtccccggataccagtc

SEQ ID NO: 89 - DNA, 25 bp, Artificial Sequence
  Synthetic oligonucleotide
ctgaccataggcccctgacactgaa

SEQ ID NO: 90 - DNA, 25 bp, Artificial Sequence
  Synthetic oligonucleotide
ttgtcgctttggcaggcataaaacc

SEQ ID NO: 91 - DNA, 25 bp, Artificial Sequence
  Synthetic oligonucleotide
tctggtcatcaacttgctttccgtg

SEQ ID NO: 92 - DNA, 25 bp, Artificial Sequence
  Synthetic oligonucleotide
cagtgtttcgtggtgtgctctgtgg

SEQ ID NO: 93 - DNA, 23 bp, Artificial Sequence
  Synthetic oligonucleotide
gctcaccatccgggcaccaagca

SEQ ID NO: 94 - DNA, 25 bp, Artificial Sequence
  Synthetic oligonucleotide
tgagagacagtgtttcgtggtgtgc

SEQ ID NO: 95 - DNA, 25 bp, Artificial Sequence
  Synthetic oligonucleotide
tgccttcacacgcttggttatcttc

SEQ ID NO: 96 - DNA, 25 bp, Artificial Sequence
  Synthetic oligonucleotide
gacaacatcggaggcttcaatcacc

SEQ ID NO: 97 - DNA, 25 bp, Artificial Sequence
  Synthetic oligonucleotide
gttgaggctctgaacaccactgttg

SEQ ID NO: 98 - DNA, 25 bp, Artificial Sequence
  Synthetic oligonucleotide
gtttggcagcaccttcaacatttgg

SEQ ID NO: 99 - DNA, 24 bp, Artificial Sequence
  Synthetic oligonucleotide
agcagtttggcagcaccttcaaca

SEQ ID NO: 100 - DNA, 25 bp, Artificial Sequence
  Synthetic oligonucleotide
cttctattggttcgcacacttccgt

SEQ ID NO: 101 - DNA, 25 bp, Artificial Sequence
  Synthetic oligonucleotide
ccactaacttcggaggctacaacag

SEQ ID NO: 102 - DNA, 25 bp, Artificial Sequence
  Synthetic oligonucleotide
gttgtcaccacaagtctcggagttg

SEQ ID NO: 103 - DNA, 25 bp, Artificial Sequence
  Synthetic oligonucleotide
ggtttacaacttccacgacggtttg

SEQ ID NO: 104 - DNA, 24 bp, Artificial Sequence
  Synthetic oligonucleotide
acaacttccacgacggtttgacga

SEQ ID NO: 105 - DNA, 24 bp, Artificial Sequence
  Synthetic oligonucleotide
atctggcatggacggatgagcgaa

SEQ ID NO: 106 - DNA, 24 bp, Artificial Sequence
  Synthetic oligonucleotide
gctgggtggtttccgaactcaacg

SEQ ID NO: 107 - DNA, 25 bp, Artificial Sequence
  Synthetic oligonucleotide
gtcccaatcaccttccccacaatcc

SEQ ID NO: 108 - DNA, 25 bp, Artificial Sequence
  Synthetic oligonucleotide
tcagatccttcttccactcccgctt

SEQ ID NO: 109 - DNA, 25 bp, Artificial Sequence
  Synthetic oligonucleotide
tgctcgtggaacaggtaaagctctg

SEQ ID NO: 110 - DNA, 24 bp, Artificial Sequence
  Synthetic oligonucleotide
aagcgagtaggcaggtacggtcta

SEQ ID NO: 111 - DNA, 24 bp, Artificial Sequence
  Synthetic oligonucleotide
gcaactcaagcctttggtgggtcg

SEQ ID NO: 112 - DNA, 25 bp, Artificial Sequence
  Synthetic oligonucleotide
cctaacaccccttccactaaccctg

SEQ ID NO: 113 - DNA, 25 bp, Artificial Sequence
  Synthetic oligonucleotide
ttcgccctcaccttcttcctagact

SEQ ID NO: 114 - DNA, 25 bp, Artificial Sequence
  Synthetic oligonucleotide
gtctcgaaatggacaaggtgctcgt

SEQ ID NO: 115 - DNA, 25 bp, Artificial Sequence
  Synthetic oligonucleotide
agcttcactttggtcttgacggcat

SEQ ID NO: 116 - DNA, 24 bp, Artificial Sequence
  Synthetic oligonucleotide
cggagggaagtcaagtcagccaca

SEQ ID NO: 117 - DNA, 24 bp, Artificial Sequence
  Synthetic oligonucleotide
cggcattcaccctctccagcacct

SEQ ID NO: 118 - DNA, 23 bp, Artificial Sequence
  Synthetic oligonucleotide
cctccacctgtttgcgggcttcc

SEQ ID NO: 119 - DNA, 25 bp, Artificial Sequence
  Synthetic oligonucleotide
ccacattgagggagtcctcttgcaa

SEQ ID NO: 120 - DNA, 25 bp, Artificial Sequence
  Synthetic oligonucleotide
tacggcagttctggtttcacttcga

SEQ ID NO: 121 - DNA, 24 bp, Artificial Sequence
  Synthetic oligonucleotide
acaccgactgaactgaagggaggc

SEQ ID NO: 122 - DNA, 24 bp, Artificial Sequence
  Synthetic oligonucleotide
tccacgacctctcccacttacggc

SEQ ID NO: 123 - DNA, 23 bp, Artificial Sequence
  Synthetic oligonucleotide
ccttcgggcgtttgtccacctcc

SEQ ID NO: 124 - DNA, 24 bp, Artificial Sequence
  synthetic oligonucleotide
ccccgaacaaaacaccagtcaacg

SEQ ID NO: 125 - DNA, 24 bp, Artificial Sequence
  synthetic oligonucleotide
gcaactgaccacaaaacaagcccc

SEQ ID NO: 126 - DNA, 25 bp, Artificial Sequence
  synthetic oligonucleotide
ggccattgagtccctccatagcagc

SEQ ID NO: 127 - DNA, 25 bp, Artificial Sequence
  synthetic oligonucleotide
cgacgatacctccctgagttaccgg

SEQ ID NO: 128 - DNA, 676 bp, Homo sapiens
agacaagagtctcactctgttgcccaggctggagcacagcggtgcaatcttggctcactacaacctccacctcctgggtttaggcgattctcctgcctcagcctcctaaatagctgggattacaggcacatgccaccacacctggctaatttttgtatttttagtagcgacggggtttcgccatgttggccaggctggtctcgaactcctgacctcaggcgatccacttcccgacctcaggtgatccgcctgcctcggcctctaaaagtgctgcaattacaggcataagccactgtgcctggccctatcccttttaattttctaagtgaccagtaataaacaatgatttgtttattactaggtagcaggagaaaaaatttttagtcacttttccagctaagaatttcatttaaagatacctatgacatatcttgtggtactaagaatattagagaactggaaatccagtttttttgtggttttttaagaaagagaatctgactccattgcccagcttggagagcagtggtgcaatagctggggctacaggcgtgagccaccacaccaggcctggaaacccagttttaatttgtgaactacaaatggttggcaactgattccttaattgttattgcaggagtaggcccaacatgagtccatatgtagcccttctctg

SEQ ID NO: 129 - DNA, 544 bp, Homo sapiens
agggttgaggctgggaacagggagaacttcaaatgggcacaagaactcgtttcggcatgatagaaatgttccaaaatgatactatggtaatggtttcacaattcaaatttgctaaaacttactgagttgtgtacttaactgaattttatagtatgagaattatatctcaataaagctgtaaacaaataaaataactctatagaccttactgaaatagatgtcagttgcaaggcatcatctcccatttcctgtgcaattctatctcctttacatttgaaaggcttgagtcacaccagccagctggtggtctttgatccccgctctgggtcccttaccctaaagaaaggacttgagcactttctaagggtaaactctctggagactttttcagaaaggtctcaacaagggtccacttattctcggggaagctcataaaagaaacattattggtctcttgaaagttcaaaagggccattttatgagatgagaatgaatgactttccattctttcttgcttttcattgtagaagtgacttacattaag

SEQ ID NO: 130 - DNA, 432 bp, Homo sapiens
gggtaggatatggctatgtgactttctaagctatagctatggaaaacattgaaacaaaattcacgcatgccgtgtactgtgcccagaaattgtagacttgtctgggtggtgttaaggatttgacctattgagagtactcacacctgcttcttacattcaagttgttaatccttcgttcagaaaaggagacatattaggaaatatgtgaatggactgctgtgacttaaatcttaagtgtttaggctcttaaactggttcaaactaaaataacattgatgaaatagtgttttagacttctgttacatttattatatttcagaaacctgtgtgagttgactttactctcatttaagatctaggactttgttggaacgcttgcctgagttctaagttgtaacaaagggtcctgaaaatatttagttacccaaaatt

SEQ ID NO: 131 - DNA, 493 bp, Homo sapiens
atgaactcggtttaagacagggcttcttcaccattgcgagaacgttcaccgggacgagtggcaagagtcttggcttggatagcatgaagagccccagtacaaggaagaatactggaaatgctcaattcgtggagcgcgtttaaacgacgatttatttggttttcaatgatcgaggacttatgacaggatgattacatttgaccttgggacatgaacgcttggactgctgacttgtgtgtaaagctgttttgcttgtttgtgtcttgcttgacagtggttctcgatcatgatgatacctgatgctttggacatgtccacttactcctctattattcgttggatcattgtttattctgatagatagtgacttatgttcggatgtcgatcacaggattgtgattgttagtccactgtatctctgatcgaataggtctatatattattatttagatagaaaaagtagcaatccacttaggagatttattgatctgct

SEQ ID NO: 132 - DNA, 418 bp, Homo sapiens
ctattcctatctaatgctagtcttcccacttgggcacttgattcccctcttgcatactcaagggcttggcttctatagctacccctttcatttgcatcgttagttttttcacttgcaataatttactatcagccctcttggccaggtgcagtggctcacccgtcatcccagcactttgggaggccaaagtgggtggatcacttgaggtcggaagttcgagaccagcctggccaacatggcaaaaccctgtctctactaaaagtacaaaaattagccaggaatggtagcacatgcctgtaatcccagctactcgggaggctgaggcagaatcgcttgagcccaggaggcggaggttgcagtgagccaagatggcaccactgcactccagcctgggcaacagagcaagaagactccatct

SEQ ID NO: 133 - DNA, 1063 bp, Homo sapiens
ccaattttccccttttggaatgggaatgtttacccaatgtctatacccccattgtatcttgggagtaaataagttattacagggtcataggtggaaggaactcatcttcttcagataagattttggactttggagttaatgttgaaataagttaagactttaggggactgttaagaagagattattgtattttgtgatgtgagaaagacaggagatttaagggggccagaggcagaaggaaatagtttgtatatttgtccctgcccaaatttcacattgaaatgtaatccccaatgttggtggtagggcctagtgggaagtgtttgtctgatggtggcagatccatgatgaatgacttggtaccattaatttggtgatgagttgtctttctcacttcacatatccagttgtttaaaagtgtggggtccctccccccaacccctgccttgctcctgctttcacaatgtgaagcgcctgctcccacttcactttccgccatgagtaaaagctccttgaggccttcccagaagctaagcagatgccagagcaccatgcttcctgtacaacctgcagaatcatgagccaattaaaactcttttctttataaattacccagtctcagatatttctttatagcaagaatggcctactacacaaaattggtattgtatgaactgtactccggttggagtaaatttgtttttgacacaagcgtaggttagtagctctgaagctatattaaatgtatactagagttgaacaaataataaattgtagataatgagagccagattacaagaaagaagtgacaggtaagccaggggggaaggctagaatgaactgtgtggcacgggattagtgttcgcaatatcacaagaatgcacatttatgcaatacagaaatagagatatgtgagtatacatggtgaagtatacatacatatatgaggggacctaggagcaatgataccttgggagcaatgaacacacctaaagcccagatcttggtttctaaatactattctccaataaaagagtctaaggtctttaaagaaatggtttat

SEQ ID NO: 134 - DNA, 577 bp, Homo sapiens
ggcgggtgtaaacctacataccacgagtgcaggtccccatgccaactctaacagcccgacccttgaaccctgctgggcctgcccagggtccacaggtagccctgttccacagggagagacacgcagtgatgcacacactcagagatgggcacacagatgggcttgccgcgctgccatgacacgtttccaaagagacgctcggattccgaggctgcccacgcattgagaggcagccgtagtgcactggttttctgtgtgactttgggggcagagcactgggattcaaatcccagctctgctcccctctctatgcaaccttggaggggttacttagattctccatgcctcagtttccctctctgtaagtgcagataataatactttaaaaaatcatactctggctgggtgcagtggcacatgcctgtaatcccagcactttgggaggccgaggctggcagatcacctgaggtcgggagtttgagaccagcctgaccaacatggagaaaccccgtctctactaaaaatacaaaaattagccgggcgtggtggcacatgcctgttatctcagctacttggg

SEQ ID NO: 135 - DNA, 477 bp, Homo sapiens
tacacctggtgaacttcattctcaatgtctggtgcagtgcctggctcaacatggatccctgtttactatcttagattccagaggatcatggaattgtatctcccacatacaggatataaacagttatcagtggtgctagatcatgaatccaaagatcagatccagctgctgcatgcacactgggcgtcacattgcaatgtagaaaatgaatccaataatgcacactttacacaaatgtgaacattaaatgagataatgtctaaatagtctttgtaaccttaaagcacaatcaatatataaagccagctctaagaaaaacagagtaaattaagaaccaggagaacttataaattatgacttattcttacatgaagtaatttctattcaccatgatgacaaatgccaagaaggagaaagtcatggtgacttgaaaatttcctgtctcggccgggcgtggtggctcacgcctgtaatccc

SEQ ID NO: 136 - DNA, 559 bp, Homo sapiens
  misc_feature 444, 467: n = A,T,C or G
ggatgctaaagtagcgcataaattaacattcagtcctcccaacaatcctggatcttgatactgttatatccctgttttataaaggagacactaaggctcacagaggcagatgactttcccaaggtcacacagccaagaagggatagagtcaggtttcatctagctccaaaagcagagatctttcccctcaaccccactgcctctcttggtgctgaaagaaatggaaaagggtctatgtgaattcagggtcagggcagagtagcaaagtgtgaaaaagtgaggcagattccgacagctcccattactctgaagttgctctggaataacaaggagctggcactgagagcagaacacgtggtggtgctgcaggggattcaatgaaaaagaagcagaagctgggagaggatgcttacgcctgtaatcccaacactttgggaggctgangcaggcagatcacttgagctcangagttcgagaccagcctgggcaacatggcaaaactatgtctctacaaaaaatcaaaaattagctgggcgtggtggcgcacatgtgtaatccc

SEQ ID NO: 137 - DNA, 572 bp, Homo sapiens
  misc_feature 146: n = A,T,C or G
aagactgtatgcagggtccagtgccaatatttcttttttcttttgagacagagtctcgctcttatggcccaggctagagtgcagtggcacgatctcggctcactgcaacctccacctcccacgttcaagggattctcctgcctcancctcccgagtagctgggattacaggcatgtgccaccatgcccagctaatttttgtatttttagtagacatggggtttcaccatgttggtcaggctggtctcgaactcctgacctcaggtgatccacccacctcggcctcccaaagtgttcggattacaggtgcctgccgccacacccagctaatttttgtattcttagtagagaccatgtttcgacatgtgggccaggctggtctctaatcctgacctcaggtgatccacccgcctcggcctcccaaaatgctgggattacaggcgtgagccgctgcacctggtaggcagcgccaaactttttatagatatgacctccctttcctcatgaccacctgctgagatactacaagctttattttataaatgggaatccctggggtgcggtggctcatgc

SEQ ID NO: 138 - DNA, 511 bp, Homo sapiens
gacagaagggtctattaataataataataataataaaacaaaaccttctaattctgggtcaaccctatacttcccctgaccagctgtggagctttcttcatctagggcagcaagacgtcaaaggcagaggagaggttgacgcttcctgaaatcagaatttgtcctcatacagcaactcttgccaggcctagaagagaaaaacctctcaaaatttacctgcaaaaaagggagagaaagagtaagaaaaagtttactcacactggaaaaatgccatggttagcaatgaccaacaaaagctcttcctggattaggagtgcagacctagatactttggcctgaccattgactgaaatctctctagtctgatctcttaatacacacacacacacacacacacacacacacacacacacacacacaaactcgttctatatacataagagtatattggccaggtgcagtggctcacccctgtaattccagctctttggctgatatgggtggatcacct

SEQ ID NO: 139 - DNA, 534 bp, Homo sapiens
atctcagtgctagaaaggtttcatccttgaagtctttcctcttgccctcttgatatgcgatttacaacctcctgtaagctcccagacaaagagtttctctgtgtaggacagtgtcgggcaactcctttatataactgtccacaaaactgtgtttgcagcaaggttctctccttttacttcacatcactacacacttgctaagtctcaagctctttcgttttctttgctattgtaaaactcaacagtattgtacttaagaattttctcttagcattgccttctcagatcacgtgcaagcacgcttcgatcttagactgggttttggaacctagggaactggcaccttatgatttcacgtatatgaacccaacatcccagtggccttctgctccctctgtagcaaacctgagaaccgggagttttgtggagtcctcagtgcttcctattgatgacataggcaattcttcctcatagatccctgggacaaaaacaaaacaaaacaatacaaagcagacactagctggacacaacaga

SEQ ID NO: 140 - DNA, 597 bp, Homo sapiens
gtgcctcccgcattcaagcgattctcccgcctcagccttcccaatagttgggattacaggtgtgcgccaccacgcccagctaatttttgtatttttagtaaagatggggtttcaccatgttggccagactggtctcgaactcctgacttcgtgatctgcccacctcagcctcccaaagtgctgagattacaggcgtgagccaccacgcccggccaaaaaaacatttaaggtgctattctcaaaaaccatctctgttagctagctattcatctcttaagaaggtggtgtctaattgtcacaatgtcctggttggtcctcctcagctcatctgaccttcactttttcaaaacaattcagtggaaacaagatagtaggtggaactaaatttatttaaaaaataaattccttcaacaagctctggataaaatgtttccttaaagacattttaccaaccaagatatcgtgaacctaccttttaaccctttcttacttcatcttcacccatagtagtacccaacccttacataaggctattaattttacaaagcactttcaaacatagcgtattgcaatgcaagttagttcatttgttttttt

SEQ ID NO: 141 - DNA, 314 bp, Homo sapiens
ctgcaagctccgcctcctgggttcacgccattctcctgcctcagcctcccaagtagctgggactacaggcgcccgccactacgcccggctaattttttgtatttttaatagagacggggtttcaccgttttagccgggatggtctccatctcctgacctcgtgatccgcccgcctcggcctcccaaagtgctgggattacaggcgtgaaccaccgtgcccggccgacagatacaatcttaatactgcttcaatgaattaacataaaaatgtgacatcctgaatgaaaccaggcttccaaataagtactattctc

SEQ ID NO: 142 - DNA, 548 bp, Homo sapiens
tacatttccacaaagtagatgagatcagaaataaaactttcagcatttaaattattctgacagtaactattaaaattcactgctaaacagcatttccaagtctgtcttttaataaggcttataaaatattttgtcatacagaagtttttccttttatgtaatcaattttgttctctttttggttacttatctcaatgtcatgagtattgtctgctatggccttatgctagccacatacacatgtattccaaaattgtcttaaatcttgagcacaacgaattccaactgtacaaataacttcctatacagaactcgaattgtgcctcttttaactgttcagtggagttttattaacttcagaaaaaatgttaacacagccatagtcactactttcacttatataagacattataattctcaggactttcacatatgtgattatatgtgaaaatctagtcattctatctaaactagttatatcaaaactaagccatgataaaagataaatggccaatgaactcatgaaaagacgttcgactcactaatca

SEQ ID NO: 143 - DNA, 470 bp, Homo sapiens
gagacaagagtcttgctttatttaaactaatctcaaacttctggcttcaagcaatcctcttgcctcagcctcccaaatttctgggattatatagggataagccatcatgctttaggttttttcattcacagctgtgggctcgttagcaacagtggcaactgtgctttcctgtgttaaatttattatagccctgggattttagaatatgccctgtttggggaaatacttttggatgtccttgaatgtctgaaccatggagaatccttgtcagaaaaaaaaaacaaacaactttgtacctgacttttcgtggggtaaaggtttcagagtcttttaacgccttttaaagagtagcttcttacttgatataattatgtctttacccccaaagtctggttttcaaagtagataggtaaataaaccttagtgaaattaattattggctgggcgcggtggctcacgcctgtaatccc

SEQ ID NO: 144 - DNA, 489 bp, Homo sapiens
  misc_feature 250, 258, 353: n = A,T,C or G
ggatacagggtctggcgaaggtcctcttcctggctggcaggcgaccgccttcttgctgtgacctcacacagcagagtggagtgagcacgcactcttgtctcctctatgagggcactaatcccgccacgagggctccacactcgtgacctcatcacctcccaaggcagcaactcctaataccagctcagggagttagagttttaacatatagtccggagagtgggtggggacaacacttgctgcaattcanccacccangctgcgctgcgacatttacaccatgtgcccccagtgacggtcagtacctcaaagaggacccccagcctggaaatgggtggtctctggccccatangaggggtaaagaatgaagcggggaggcctgatttatagtgagtgggctccagtaacttaagaaaagaaaacctgacctgcttatgccagaaaatgttatgactcggccctgcgcagtggctcacgcctgtaatgcc

SEQ ID NO: 145 - DNA, 610 bp, Homo sapiens
taaggaaggtaaatctcttgacttcgatgtaaggataaagtgatagggaggtatctaaagtgacaaacagatttttcacttatgtgattgttagatggcggtaacagagaataggaaaggaagaaacaagatgaagagaaagagaagtccagcttaatacatatgaaatttgacatacccaagtaacatacatttgtagatgtccagtaggcaactggaatgtttaagtttgaggtctgagttctagactggggatcaaaatttgggaatcattagcaatgaaatcatagattggtttgttatcaagtattgattgtaggtatagggttagagaaattgagactatctgaatccctggaaaaaactttccggatagagtaagagattcccccagaaaggaaaataagtgacataaaggtggaaaaaataaaataataagtgttatcacagaaagtataggaaaaagcttcttaagtccactaatgtttatatttaaaaagaactcggataagatagacaatagtgctatttgaacaataattcacaaccatatctgttagtatcatctggagaccttctttaaaaatcaagtataactggattatgtcta

SEQ ID NO: 146 - DNA, 501 bp, Homo sapiens
  misc_feature 283: n = A,T,C or G
ggggtctcgaactcctgactcaggtgatcctcctgccttggcctcccaagtgctgagatccactcccaaagtgcatgggtggtatgagccactgttccgggccagtgagttgtaattaaactgtgcaacagcagccgtgacaagccaagacccagtggtgtctgtactgaccacgcgctgactacagatgcctgtccagcaaagtaaacttgagggcttcccgctttacacactctcctggtgagaactgtacagattggcacatgctcagtgtgaggttcangatacctaactgaatagccctcatctcaacagaccagttattttatcttggataaaatggcactcgggaagccatagacggaggaaagtgtccttggtaatgggccagagagggcatctggaatttctctcatgaactaccttggccccagcttgcctccatcatatataatcattgcagccgagttatgaaaacatcgtgtgcctgggcatggccct

SEQ ID NO: 147 - DNA, 595 bp, Homo sapiens
gggtgacctttatgtggatgttgactggaaatttaatgctattaaggaactattgttgaaatttctaatatgtgatagtcgaaattacttgtgtttttaagagacctaattttttagaaatgagtttctcaacctcagcactgacactatattttcacatctaggacatgatcctaggaaaagcaatcagaaatgtgaacaaaaacgtgtgcacagaattgttcacaatagggtcatttatagtagaaaaataagcatgtatattttggggacctgtgcaccattcagaggggaatatggagtaaattatggcccattcatacaatagaatattttgcatcttttttatatctccatagattttgggggaacaggtggtatttggttacatgagtaagttctttagtggtggtttgtgggattttggtgcacccatcacccgagcagtatacactacacccaatttgtagtcttttgtcccttttaagtgacatttataaggaattgttactagcatgagtgaaaattcatgcgacacgatagtgagggaaggcagtaacattctctctgtcaatagatattatatatatatgca

SEQ ID NO: 148 - DNA, 618 bp, Homo sapiens
  misc_feature 530: n = A,T,C or G
tatacacacacacatacatgcacacaccactttgtatatgaccgcaaagaaatattagaatattaaaaagacaagtctgtctcagtatttcattttagccctatcttttattaatgcatggtgtgcaataacaaatcacaataaccagtgtatattgagtgatataatatattatgctgaagttctttcattccatcatctcatttattctcaccttaatgttgtctttattttaaagctgcattttaaagcaaaatctgccaaagttcacccatctagtaaatgacagagctgggactggaaaccaggctagaatatccttgtgtatgaatcagtaatcatggtaaacaagagattggtcagggaaaaattttggttggaataggaggagagagagtccagtatgtaaaatgtgattttgctattttacttgaaaattgtagatttgtagaatatcagacacccatacttaaatatgagtacagcctaattattgctgttcctttttctttcagaaatttgatactcanaattcacaaatgagagcttccccacatttttacttaattcataatttcttcacacatttataggacatacacacttcaagcatgtatg

SEQ ID NO: 149 - DNA, 398 bp, Homo sapiens
ggtgcccccatgattcaattacctcctaccaggttcctcccatgacacatgggaattgtgggagttacgattcaagatgagatttgggtggggacacagccaaaccatatgagtgaccttatttgccctttattcatttcacttcatgtagccatagatgggctgtgagaatcttggataatcagcaaaccccattgtctgttttttttttctttttctaaaatgtccaccctctgatgatcatttaaatatgttgatacgttgtccttcagttaacattattttaggtttctttcttgctttctttttttttttaaagtctcactctgtcatccaggctggagtggaggggcatgatcttggctcactgcagcctctgcctttcagtttcaagggat

SEQ ID NO: 150 - DNA, 424 bp, Homo sapiens
gatataactcaggatgctgcttactcagtgtggtctcatccatggcagattttatggtctcagctcctgttatacgaaagggcaggttctgaagcatgggattccactttccctctagccctggatacagctgattggatgggcaaacccctgttccaagcagagcacaactcatgggctcggcttgaaaggattaactgaaccaatcagagtcctcccttgaatactggttgacacaaagtacagttgcagctgagatggacactggagtggagaaacagaaacaggttagtgtggtggctcacacctgtaatcccagcactttgggaggccgagggggacagatcatctgaggtcaggagttttataccagcccggccaacatggcgaaaccctgtctctactaaaaatacaaaaatgagcc

SEQ ID NO: 151 - DNA, 513 bp, Homo sapiens
gggcgctattccttagtgacctgtagattcattatctgtgtcgccacaaccttgtccttttagatttgcatatgtgttaagtccaatcattaaatccagtgatttttcaaaatagcaaaagtaggtgtataagtttccaacatgtgtataatttgaagctgaggaatgactaagaatgaaagaaactcagtttgttccactcagtgggctgcatgtgcctatggagtttcacttgaagcaaactctctcgaggcaaacctgctggcctcaccacctcagaccccgcctgaatgttcatgggagagacttggtgttgggtccagttttgagcttttttgaagggacagggagagcctggaatatgacttcctttaaaaacaaaaggtagttgtaggcaaggtcgggttttttttttgtattttctaaaataaaaatttatattttttttaaagtatagacttgcttctccctggagggccacacagtgactcatctgactgcttctgcaagctg

SEQ ID NO: 152 - DNA, 534 bp, Homo sapiens
  misc_feature 445: n = A,T,C or G
ggttccctaagtcaatggtgtaccaagtgtatacttgttgattttatgttgcatgggtgtggactattaaaaagctttactacttgtaatagtaacaaaaaaaaatttaaaaagcaaccaaaactatctataaaattataaaaagcattgtaaagaataatgataactagtaacattttgatgagtgattattgtgccatgcactgctctaagcgcttttgcgcgtaatgaatttcatctttaaacctgaccatatgaagaaagaattgttattctcacttatgactattaggaagtaaggttcagaaaggctaagtgaattgttcaaggtcacgcaaccagtgtgaatagtgagctggggaataaaaccaggcagatcacactcttaacatctgctccattgagctgtgtacatcagcccttgaatttcacagatactgctcangatggggcagacatcattgtttatgatttatttttaatgagtcaattcaaatacaaatattaagtaaatacacaactctctcgttggct

SEQ ID NO: 153 - DNA, 324 bp, Homo sapiens
ggaagttcatgttttttcctcatgcaactttctgcaaaactgaaggttggattttaaatataaaatatttgacatgaccaagttatatttacccttgtcaactaaaaattgacttttttcaaagtttgttatttttttaatttaatttaatttaatttaattttgagacagagccccctctgttgcccacgttggaatgcagtggtgcgatcttggctcactgcaaccaccgcctcccaggttcaagagattctcatgcctcagcctcctgagtaactgcaattacagatgtacaccaccacgcctggctgatttttgtatttt

SEQ ID NO: 154 - DNA, 544 bp, Homo sapiens
gatatcacatatatatcacatatatatgtatatatatgattaaatgctacttgttcatgaaaatgagtgaattaatggcattcacagcaacctgaatgagattggagacaattattctcagtgaagtaactcagggatggaaaaccaaatatgtgtgttctcactcataagtgggagttaagctatgaggatacaaaggcataagaatgacacagtggacttcggggattcaaggggaaaggatgggaaggtggtgagggataaaagacaataaacagggcactgtgtacactgcttgggtgatgggtgcaccaaaatctcacaaatcatcactaaagaacttactcatgtaatcaaacaccacctgttccccaataacttacagaaataaaaaaaattaagaaaatgattaagcaggttagcatattgcaaatttagtgaagaaaggaaatggtatactctgtaagttgccttttttatggctttttatccccacatgctattacagaataaattatttttattatctccataatatcacctt

SEQ ID NO: 155 - DNA, 487 bp, Homo sapiens
  misc_feature 168: n = A,T,C or G
gacagaagggtatgaatatttaacagtaacaagttgatgcagtttaaatgttcctgggtccaggcttaacagaatattgtaaggaagatttactttcatgaagtgaaagtaagtgttttaaatgaagtcaaatactcttgaggtcttttatcacccactaaagcttanagaggccgttttatcctagagttgagtttgattatcagaaaccagcataaactttgccctaaataaacagttcaggtaaggaaaggatttttccttagtaaaattaatgttttgatactattgtattatggttctagagagaaacaggaccagtacaatgtgtgtgtgtgtgtgtgtgtgtgtgtgtgtgtgtgtgtgcacacacagagagatatttattttatggaattggcttacaatatgatggacgctcggccatgtggggtggctcacacctgtaatcccaacattttgggaggctgaagagagtggatcacct

SEQ ID NO: 156 - DNA, 392 bp, Homo sapiens
agggatagttgatattcacaagatctctgagggattgaaatttataaagtatttttgaactataagagtttgaattcgttttactattgtgtatattttatattgtattatgtatggtatattgatagttactgatttgtaactttatatgagtaaatctcgttatcttaattttggaaatactctgtaattctcaaattactagagagtttaatgatgcaatgcctttttttaatatttcaagacatttttattctatgatttttaaaaaacaaaaaccgtcattttaaaatagcctattgatttctaaaaaattattatatttttcaatcaattataaattttcttttcattaaaaacttttttgttcttttcataaccatggaaacaag

SEQ ID NO: 157 - DNA, 501 bp, Homo sapiens
gtttcctcttatttatgggcatagaatactgatggaaattctctcaattacaaagactcatttgccagaaggtggctttggtgacctgaactaaaattgtccagtaagccggaactgtacaccagcagtacctgggtgtggctgggtaaaaggcatgtcagtgacatcatttaggacacacaaaagaacagttagtgcctctgtgaatgcaaggatcatgtccctccttactcagcagcctagattcctgctgatggagaaatactggaagaaaagtaattattcatatatatatttataaacacatacatatatgtgtatttatttatttatagcagttttgtaacatacttttgagacaagttttaaaacttcaatttgatagccaaaccttctttattaacatttgactcttccccaatgacctgagttagcactcatcattgtgttctttatatactgtgtttatggaaatgacaccatgtgagaatgaaatgctgt

SEQ ID NO: 158 - DNA, 489 bp, Homo sapiens
caccacaccgctgactgccataaacttagactggctttgcctgtttttgtacttcatatgaaaggaatattaatgtatgctccattttgtgtctggctgtttttgttcaatataatctttgagattcacctcgtactttatggggatgaggagatcatgtgtttacacagcagaatcatattacattatgtgccaagggctttgatggtgtgctcacagggatgcataccaatctgtatgctcttcaatgtgtgagcaatttggagggatgatgcacagtagataccaaaaaaattcacagatataagctgtaacaggtattatgtgttaagaagcactccagaaaaaaatccaatatttctttatctatagatatatacattgagaaacatgtatatatctacagataaacatccaaggtgttaaacaaaatcacttttactaatttatacagtaattccagtaattctttggcagtagtttttttga

SEQ ID NO: 159 - DNA, 267 bp, Homo sapiens
agaggggaattaagacagaaaaactgtcctttcaaaagaaagacagtttatggttgagaatgtgtatagtacttgaagagttagaaaagtgcatgtagccaaatgatggaagattttgttgccatgtatgatagggtaagcaatatcaaatgctataacagataagtgccaaattctcagaggtctctctctctctctctctctctttctctctctttctctcctctctatatttctctctcacacacgcacaaacgcacacacaca

SEQ ID NO: 160 - DNA, 525 bp, Homo sapiens
tacaaaatttatggtatattctcaatgtttaactcaaataagttaatgtttacacacacacacacacacacacacacacacacacacacacactctctctcccataaaatgcagcgtgataataatgtgactcacaagatttattcaaaacattacttctgatgtattgaggtgatgtggcccaataatggatctgcatgttcaagttctttgatgaaagattaaattcactcctgtcactgtgtatctgagatgggatgttaaatctgatttggagagagcattgaaagtccaaaactgcacccataaaaagaatgaaatcatgtttcttactgcaacatggatggatctggcggccattatcgtaagtgaaataactcataaacagaaaatcaagtaccatatgttctcacttacaagtgggagctaaacattgggcacacacgaacataaagatggaagtaatacacactggacaccccaaaaagggggaaggagagggttaaaaaattacttagtggatac

SEQ ID NO: 161 - DNA, 518 bp, Homo sapiens
gggatagtgagttagttctcacaaaagagatggtcttataagaggattccccctttgcttggccctcactttctctttcctacctctacatgaagaaagacatgttttctttccccttccaccatgattgtaagtttcctgaggccaaccccagccttatagaactgtgagtcaattaagcctctttcctgtataaattacccagtgtcaggcagttctttatagcagtgggagaacagactaatacaaatgccaagtgaagacttggagagggaaaatccacaataaaatctatgccagattaaacgagttttgaaatggaacaaaacagagttaataatgactaggtggagaaggtctacagtcagtggaaaaattaaaactagaattcagaagatgtgtatttcgagagtatcaacaacaaagtgataagtgatagttgaagctatgagacaagataattcaagaagaaagtgtaaagggagaagccaggtgcagtcactcatgcctgtaatccc

SEQ ID NO: 162 - DNA, 585 bp, Homo sapiens
  misc_feature 250: n = A,T,C or G
acagaagggacactgaattttcagcttggttacacacacacacacacacacacacacaaacctcacaagaacctggtattcagaataaaaagagctacagataaaaactttttgaagcttgagtctgcgtctctctgaaggtgagctgccttcagttaattgctgttttgttgctccctatggtgattacttttatctggagccctaaagacctatggggacctctgggggtgacaacaccatgactgancagtgcatggagaggccgacaaatgtcagcatcagaaacctccatgtgaggataatgaattcaggcgtttcaaaaatcaaccagcttcagagaatggcatttgagtgtagtcatgcttatttttgaaatgtaagagcttgaggctcccctactgaaataaagagttttcaaacaaaggcctggaagagctggattggcagctgctttcatatctaaaaaatggtgctgctgttcaacctgatccaaggtgaaatctaaagatgagggcaaagaagagagatgctcaagggtagttaaattcacagaagcttaccaaaaaaaaaaaaaaaaaaaaa

SEQ ID NO: 163 - DNA, 527 bp, Homo sapiens
gggaacctgaccttttggacaaacactggaattgaacaccagagctaggctgggagaaccttccattagctgtcgcactgactgggcgttcaaaactgcacaggaggccgggtgtggtggctcatgactaatcccagcactttgggaggctgaggtgggtggatcacgaggtcaggagttcgagaccagcctggccaacatggtgaaaccccgtctctactaaaaatacaaaaaattagctgggcatggtggcatgcgcctgtaatcccagctactcaagatgctgaggcaggaggattgcttgaacctgggaggcggaggttgccgtgagccgaaatcatgccactacactccagcctgggtgacggagagagactccatctcaaaaaaagataaaacaaacaaacaataaaaaccgtacaggagcccacaggtaagccaggcatgtggtgtcacaaagggaagagccagcgaggtttcacacactgacgcctcccctccagctctgaaaccaccccggtgccctg

SEQ ID NO: 164 - DNA, 481 bp, Homo sapiens
  misc_feature 353, 385: n = A,T,C or G
acagaagggattgactggactacatgatttttataatctctactaaaattctgtaacttaacagttttgtgctccatagcttgtaatattatggttccagcatgcttccactgcatggctctgctgaccataacttgtgactttataaacaagatttatgttagttaaaagtagaaggctgggtgcaatgactcatgcctgtaatcccagcactttgggaggccgaggcaggcagatcacctgagatcaggagttcgagaccagcctggccaacctggtgaaaccccgtctctactaaaaatacaaaaattagctgggtgtggtggcacacacctgtaatcccagctactcangatgctgaggcaggagaatcgtttgaacctangaggcagaggttgcagtgagccgagattgcaccactgtactccagcctggttgacacaatgagactccgtctggaaaaaaaaaaaaaaaaccaaaa

SEQ ID NO: 165 - DNA, 620 bp, Homo sapiens
agagggtcctttattccccagcagttagagctgtcctgctgggcacagtggtgcacacctatagttcccgctacttgggaggctgagtcaagagaatctctggagcccaagagttcaaaactgtagtgtgcgatgatcgtgcttgtgaatagccactgcactccagcctgctcaacatagtaagacccagtctctaaaaaagtaataatagagtggtccctggcatatggtataggcatagagttcagtatatattatatgcattttcagccaggcgtggtggctcatgcctgtaatcccagtactttgggaggctgaggtgagtggatcacctgaggtcaagagttcaagaccagcctggccaacatggtgaaacctatctctactaaaaatacaaaaattagccgggtgtggtggcacgtgcctgtaatcccagctactcgggaggctgaagcaagaaaatcacttcagcccgggaggcggaggttgcagtgagccaagatcctgccactgcactcgcgtctgggcgacagagtgagactccatctcagaaataaaaatttaaaaaaaaaattagtccagaaaaacatctcacagctgaagtggtctcatgggaaggg

SEQ ID NO: 166 - DNA, 633 bp, Homo sapiens
aaccaagccgggcgcctcttgcaatggagacggtcatttcttcagaagctccccgctgtggaaaatgagcatcctcaaggtaagtttactgaagaaaggaaactgggcatgaaaacaatagcctgaccctaacaatgtcttcaacaatgcttttgaatctctcccctggaaaaatcaaagcagggccagataatgtgccaaaccacaaaaatcagtgacagtagtttggcaagatcacccaggaataaatcttgggcagagtggggatgattaatatcttcaattatcaaaccacttgagagaaacatctgaggtacaggcaaaacttccataggcaactctgggctggctaccatgttttagaagtcctgggtattttctgcatagtccaggaacagtgctaccaggattttatcacccagcaagctcactaaagccactgaatgtacaccaaaaattatgcaaagggcttggtgcagtggcttacacctgtaatcccaccacattgggaggccaaggcaggtggatcacctgaggtcacaagttacagaccagtctgatcaacatggtggaaccccatctctactaagtagaaaaaattagctgggcttgatggtgggcgcctataatccc

SEQ ID NO: 167 - DNA, 522 bp, Homo sapiens
ggggctttgctaataggtgtgtagtggtatctcattgttggttttatttttcaatttcaaaagtgctactagtgatgtagaaggatagaggagaaaggaaaccctgtagccccacgtaactcctcatcctttagagttaatggtataatatgtatctttctagatgtttctctctttatgtgtaagaaggtggaaatgtctaaggataagcttaagaaataaaaacagattatttcaattacctttgacattataaatttaaaatataagaaaacacctggcagtccagacaaatttttaaagaagtcaaagttaacttttttggaccattaatatattacgtgtatgattatcaaagattttaaaaagtatacaatgagaacagtagatcttatccctgacaactgtcttctcctatcctcattatttcattatttggtttctctggaggtagtggcagggtgtgtgtgtgtgtatgtgtgtgtgtgtgtgttagtgtgtgtatgatacatgtacttaagt

SEQ ID NO: 168 - DNA, 441 bp, Homo sapiens
  misc_feature 91: n = A,T,C or G
ggatcatgtatcaagtgataaagcactagtatagttatacagtagtagggagataccaaagtaaatgacttttataatgtgggattctagngaaaaaaagcttagaaaaattcaactatcccaaatttcagtttgttttgtcaatcacagtttcatccttgtttatacatttcctgtcctgcatatttagtttgtatttttttaagattttttaaattttatttaattaattaatttatttctctgtcacccaggctggagtacagtggcatgatcttggctgactgcaatctctacctccctagttcaagcagttgtcctgcctcaacctcctgagtagctggaattacaggcgtgcaccaccacgcccagctaatttttgtactcttagtagagacggggtttcactatgttggccaggctggtcttgaactcctgacc

SEQ ID NO: 169 - DNA, 516 bp, Homo sapiens
  misc_feature 327, 340, 416: n = A,T,C or G
gggtaaggatgtcagtagaatcccaactctgtgctgagagtcttgtgatggctccagggctacagatggtgccactgccttggagccctgttgcccaggctggtctcaaactcctggaaggcacagacatttcctggacacctgctgcaggcccagcgcggggctaagtgctttatgaacgctggtatggtgggtgtgacaatttctgaccaggatctatcctgccatcatggttatggggtggtctgtgagagccaggcccctgcagttgtggtgcccagcaggggctgaggttgctgtggttgagtgagggataaagtgaacgangattaagaactanacagtctggctggggtgcggtggctcatgcctgtaatttcagcactttggaggccaagatgggtggatcacctgangtcaggagttcaagaccagcctggccaacatggcgaaactctgtctgtactaaaaaatacaaaaaattaactgggcctggtggcaggcacctgtaatccc

SEQ ID NO: 170 - DNA, 505 bp, Homo sapiens
  misc_feature 189: n = A,T,C or G
gggagcggcggcggctccgaagcgcttgttcttttttgtgaaaggcgattcctccaccacctcttaggatcttgggcaagtcactcagcctcgctgagcctgtttgcatcagtagggttttgtgaggctccagcccttcaaccgaacatttgctgagcatctactgtgtgcccagcagggccttcttanatcaggtataaggcaggagggaagcgtcgggagtcccaggcctgctgcctctgtaaccatgggcaggtggttcaacattacctccccttcttccccactgctctgccccatcctggcttttattgtatctcctctaaaagggtgtgagctccacggggaggtacccatgtgctttgaggaaggtctgccccagtttatattcaataggtactttttgaataattattgcaaggactagttctcagcacagagcttaacacataggaggtgtttgataaatggcaattgttcatgcaataaagaacaatagcaggcc

SEQ ID NO: 171 - DNA, 546 bp, Homo sapiens
cagaggggcttcggtttgtcatttataccactgtgcacagatggttcttatgcatctttatgatctttttcagtattatttactgcacttccatcctgccccaggagaccaggtgtgaaatccagcactaagcagtttttgctaactgtgaattgcattgagccaaaggggccatgtggttggaccttggaatttgaaataacgtcattacttataccatgaaattcaactgcctgtcaactgaagttctaaaatatgccccaaagagaaagtttctcattttaaaagatattattaatttgggttatcacttaagaaacatgacaatttattgaatttatttttcctggtataaacatgggcatttttaaaatttaagtttttatttgctaatataatttattattattatttttctgagacagggtcttgctctgtcacccaggctggagtgcattggtgcaacatggctcactgcagccttgataaatagaagttataaaatagaaccagtggggtgggatggtggctcacagctgtaatcct

SEQ ID NO: 172 - DNA, 495 bp, Homo sapiens
ggtaccaagagaccgttaaaataagaaagcatggctgggtgtggtggctcatgcctgtaacctcagcacttcagaaggccaaggtgggtggactacttgcaccccaaagttcaagaatagcctaggtgacatggtgaaactccttctctacaaaaaaacaaaaattatctgggtatggtcacatgtgcctggagtcccagctacccagaaggctgaagtgggaagattacttgagcctaggaggtcgaagctgcagtgagccatgactgcaccactgtactccagcctgggtgacagagcaagaccttgtctcaaaaataaataaataaacaaacaaacaagaaagcacaatacattcagccacaaaacacaggcatcagatatgcaagaatcctgacagcagaaaatggctgaagcacaatatttacaaggcaaagggtttctgactaaaataagacagattctaacaacatactgtttacaagaattaaatct

SEQ ID NO: 173 - DNA, 544 bp, Homo sapiens
tagttccaataacaaactcattaaagttcaaatgttttgcaattctttttgtccttagaatacgttccagtgagtatagacagttaagatactctgtaaactggaattaaaaactgagattactttttattaatatcatataaagtttatttccatttgtattcagttttagggctctccccatctttattgatttaatttttgaatgtgaaaaacagtaacatttttttccatttcacaggaaaataatttagtgctcattacagctcatgatgtgctgttttattaaggtttgagtttatgctgttactatcaatgggggtcttttgtttgctatagcattataataatcattatcatttgaaaatgttggctgggtgctgcggttcacacctataatcccagcatttggggaggccaaggtggggagattgcttgagcccgggagttttgagaccagtctgggcagcataatgagaccctgtcttaacaaaaaaatttttaaaaattaggtgggcatggtggcacatgcccgtagtcagtc

SEQ ID NO: 174 - DNA, 492 bp, Homo sapiens
gggaggccaagtgggcggatcacaaggtcgggagatcgagaccatcctggctaacacagtgaaaccctgtctctactaaacaaaatacaaaaaattagccgggcgtggtggcgggcgcctgtaatcccagctacttgggaggctgaggcaggagaatggcgcgaacccgggaggtggagcttgcagtgagctgaaatcgcgccactgcactccagcctgggcaacagcacaagactctgtctcaaaaaaaaaaaatttctccccgagtcttaccatggctagctcttttatgctctgaccaccctgttacttcgtggttttatactaccaaagtataagtagtttataatctgaatgatttttcagaaaaatcaatcaatataatctgtcacattaacagattagaggagaaatacatgattgtctcaatagatgaagaaaatgaagctcttaaaatcctatagtcgttcatcattaaaaaaacacctctta

SEQ ID NO: 175 - DNA, 435 bp, Homo sapiens
gacccttggtaaatgtttactgaatgcacgaatgagtgagtaaatgagcaaatgatcctttgggttctttctttatagcctctcagctattctttttgttgttgttgtttttttgagacagagtcttgctctgtcgcccatgctggaatccagtggcgagatcttggctcatcgcaacctccgcctcccgggttcaagagattctcctgcctcagcctcctgagtagctgggactactggcacatgccaccacgccgagctaattttttgtgttcttagtagagatggggtttcaccatgttagccaggacggcctcgatctcctgacctcatgatccgcctgcctcggcctcccaaagtgctgggattacaggcgtgagctaccgcgcccagctcctctcagctattgtaatgtggttcatgactccccaagac

SEQ ID NO: 176 - DNA, 541 bp, Homo sapiens
attacaatcatatcagcactaacaacagtgtcccaaaactacatacacgtgaaatttaacatgattgaggggatcaataggcaattcaacaataaaagcttttgttcataccctcttcttaatcagtgataagtcaattagatagagcatcattgaggttacaacatacttcagcaatgttgtcaaccaatttgacctgagatagatagatagacagttagacagacagacagacagacagagaaaacttcacccaacaacagaaatacaaattattttcaagcatacctggaacattctccaggatagagtatatgttaggctataaaactgtactcaataaatttaagattgaaaccatgtagagtatgttgtgtgaccatagaggaattagaaatcaacacagaaataaatttggaggtcacaagatatttggaaattaacacactttacagagcccattggtcaaaaatatatatattaaactagaaaggccgggggtggttgcttacacctgtaattccagcactttgggaggcgt

SEQ ID NO: 177 - DNA, 575 bp, Homo sapiens
tgtagtaataaacaggacttggtggtagattgaatgacacagggattgaggaggaatccagagtataagttgcagtaacaacttcagaattttcttatgtagatagtttagtaataaatagcagtctgcagaggccaggacttgtgtcttaaatcttttgtaaaacaaatacgctgtttttacttacgttatacatttatttatagtgctttgtgggaggtactgttggagattaacaggtgactttttcagccactgcaagagtagctcattttttgattgagcacaactaagtgaatggctattttcttaaataggtagccctggaaaagggatgaagcatgggcggggacgtgtaggggtaggtgatcatgaactcggttttgaatatattgagtttgagttatctgtatgagatacccaggttgaaaatcggttgggtagttgattgtgtggatatagagctcagaaaagatatcagagctcaagaaagaaatttgggagatttttgcatacagatgttaactgaagccatgaagttagatggaattttaactaggatgaaagtagaaaga

SEQ ID NO: 178 - DNA, 593 bp, Homo sapiens
ttgaccctttactgaaaaagagtcttgaaacagtaatcatggactatttctttagaattaaaaaaagtgagaataatgaaatagtcctgataaatatttattttatttatgatttaagcagtgcgtctaagcatttgaattattgacttgacctcttacattttcaaacgcaataaaagctctcttagccgacttttatttaactgacttacctgatgaactgacactttcccttaatacagctgacacccataactcacctattctcaaataaatacatacatttctgctcccaccattttatgtttaccaactttagttgtgtttgttctccaatttatttatcacactagtacctaaaattgtaaccacacaatattgtataattgtggtactgtaaatatatactaagctgaatagaaagaaaaggatgtaaagaattgttttatgattaagtacatcagtcctagactgcagtaccttatgaggatcattcgcactaaagtccattaaaatgatgtgaaaacagtattattattattactctcaaaattgatatgaaaagtaaaataaactttcttaaaaactcactt

SEQ ID NO: 179 - DNA, 597 bp, Homo sapiens
acagaagggtacagccatttatttccccattactgagacaagacctttttgagaacactacccaatcacctgtgagttattagtttttccagtcgggctggtggaaataggcactgttcctggccctgtgtgagtgctatgcactcttacctctcatcgtttttgatgttttcccccctattctcaggcatttcctcacatgcactcgttgataagtattctgtcaaacatccaagtaacctatgaatatagtatttgactatgtgttctcaggtggagttgatgggggaaagaaaacttaagacaaaccttgagctccttttattaggattatttttcatagttgtatatgcaaaacagttcagaaactcttgtaggattgaggaaatgagtaatgtctcaatgttcttgggagccaagattctcactatagaagaagatatacgcaggtacggaacagggcaaagtgagaaagaatcctgtggcaatgggtttgaattggaggcattggtgtgaattcaagctttgtaaagtatgtgtgtgaatgtgtgtgtgcgtgtatgtatatacgtgtgtctgtacttgcatatatttctc

SEQ ID NO: 180 - DNA, 576 bp, Homo sapiens
ggtggcatgatctcagctcactgcaacctctgcctcccatgttcaagcaattctcctgcctcagcctcctgagtagctgggattacaggcacatgccaccatgcatgtatttttagtagagacagggtttcaccatgttggtcatgctggtcttgaactcttgaccatgcccagctaatttttgtatttttagtaaagacaggatttcaccatgttagccaggcttgtctcaaactccataccacacccggctcatttttttattttcagtacagacgatgtttcatcatctcaaccagctggtctcaaactcctgacctcaagtgatctgcccacctcagcctcctaaagtgctgggattacaggcatgagccaccatgcccaccccaagatttcctgttcttatctccaataagccagcttgatgaggagtagcgctagagattcccatacttcttgacttccttctatccttttgtgctcacaagccccctgtgagaacactgcatgttctcactcataggtgggaattgaacaatgagaacacttggacacagggtggggaacatcacacac

SEQ ID NO: 181 - DNA, 528 bp, Homo sapiens
gccagtctagtccttcctgttcttctgcctcctttatcctagccatgctggcagctgattgttttgtgcccacccagattgaaggtgagtctgcctctcccagtccaccaactcaaatgttaatctcctttggcaacgccctcagacacacccaggaacaacactttgcatccttcaatccaatcatgttgacctcaatattaaccatcacaagaggtttatttcatttacaaagatatgaagaaatgtaaacaatttcccctaaggaaagtgagcaagatgattattcaaggaaaattttatttataacctaaaaaacagaggaattctagcagatatagattttcattacattgcatttgttatagaaatacaaaagctatgacctttcctttggtttgttctttttatttaacaaaatctgtttgtcgtgtgtgattgttttttaacatgactctgtcctgtttacggtttaaccgttgcaggcttcaaattattaatccaagactggatatattaactctgtct

SEQ ID NO: 182 - DNA, 500 bp, Homo sapiens
  misc_feature 368, 408: n = A,T,C or G
acagaggggtggctataaagtactcacaggagtaccaagctttgtgggtgacagtttcattatccccttttcaggcagtctgggcactgggaaacatagctggagatagctctgtttgccgagattacgtcttgaactgttccatccttaatcctttgttaacgtgagtaattataatcatctgtacctgggcgtctactgggtggccacgtggcaggtcatttgggggcagcatacttgattccttaagatgataggtaagtgcaaaaactataaaaatgcattctgattgccaaagtaaaagataggtatctttggagattgagaaggttgtggccgggcatggtggcttatgcctgtaatcccancactttggtaggccagaacaggtggatcccttgagcctanagttcaaaaccagcctgggcaacatggtgaaaccccaactctacaaaaaatacaaaagttagccaggtgtggtggcaggcacctgtagactc

SEQ ID NO: 183 - DNA, 487 bp, Homo sapiens
agggtacatccatgccaacatctgttgcttttgacttttgttttgttttgttttttgagacagagtctcactctgttgcccaggctggagtgcagtggtgtaatctcagctcactgcaacctctgcctcccaggttcaagcaattctcctgcctcagcctatggagtagctgggattacaggcgtgtgacaccatgcctggcttttttttgtttttgtttttgttttgcattcttggtagagacggggttttgccatgttgcccaggctggtctcaaactcctagcgccaagtgatccaccggcctcaacctcccaaagtgctgggattacaggtgtgagccaccatgcccggccttgctttttaattgtagccattcttgagtgttattttttaatcttagctttaaggtggctatttaaagaaaatctaatccagtatttacagaatccctgaactctgcagaaaataccatttgaaaactacta

SEQ ID NO: 184 - DNA, 542 bp, Homo sapiens
  misc_feature 491: n = A,T,C or G
ggtgataaatttgctatgatttgaaccccccagcctctgggcctggatttgatgatcacaattataaaaatataacctactgtgccactttacacttggggtgattgattttggtgcttatcgctaaactagctcaaagggttgtcttcatccaacataattactattcctgtaattactgaatctataaatttcatgcctcttttgtttcaaacagaaaaatgggcttgggaaataagaaaaacgaagaaatccttagtcaaaataatatacaccaggtgttctttgtctcggcttgatttaattagtcttgctcatctaatacgtcatgcttgtctctccgtatcactgaattttcagcttggttacacacacacacacacacacacacacaaacctcacaagaacctggtattcagaataaaaagagctacagataaaaactttttgaagcttgagtttgcgtctctctgaaggtgagctgccttcanttaattgctgttttgttgctccctatgttgattacttttatctggagccct

SEQ ID NO: 185 - DNA, 525 bp, Homo sapiens
  misc_feature 370: n = A,T,C or G
gcttcctataaaacaatctccacctccccacactttgctgtatgaggcagagaacagccccaaacatggacaggccttggtggaaagggtgcgttgttgctgttgtgaatgggatgacacggcctcctggcctagcggcccaggtccctcgcggcaggggctggatttcccacccagagcggagctcatggcctgcagcaccgcagagacggttcctgggaggagcggggccagggagttcctgggaacgtgctgttttcattactgatattcccgagggcttctctttggggttgaaggagtaggaggaactgtgccttcttaagaatgtgagagggccgggcgcggtggctcacgcctgtaataccancactttgggaggccgaggagggcggatcacgaggtcaggagatcgagaccatcctggctaacacggtgaaaccccgtctttactaaaaatacaacaacaaaaaattagccgggtgtggtggcgggcgccaacagtcccagctactcgggaggctg

SEQ ID NO: 186 - DNA, 650 bp, Homo sapiens
acagaggggggtatgagagatataaggaaggtaaatctcttgacttcgatgtaaggataaagtgatagggaggtatctagagtgacaaacagatttttcacttatgtgattgttagatggcggtaacagagaataggaaaggaagaaacaagatgaagagaaagagaagtccagcttaatacatatgaaatttgacatacccaagtaacatacatttgtagatgtccagtaggcaactggaatgtttaagtttgaggtctgagttctagactggggatcaaaatttgggaatcattagcaatgaaatcatagattggtttgttatcaagtattgattgtaggtatagggttagagaaattgagactatctgaatccctggaaaaaactttccggatagagtaagagattcccccagaaaggaaaataagtgacataaaggtggaaaaaataaaataataagtgttatcacagaaagtataggaaaaagcttcttaagtccactaatgtttatatttaaaaagaactcggataagatagacaatagtgctatttgaacaataattcacaaccatatctgttagtatcatctggagaccttctttaaaaatcaagtaataactggattatgtctaataaatcggaatgcctg

SEQ ID NO: 187 - DNA, 585 bp, Homo sapiens
tacagctcttaaggttttcgtgaagatttagtaagatagagctagcaaagtagttttgcacagtatttggtacattaacatccacacattttaactattttttcaacttcctttatatataaaatcccttaagagaaaagagctgggcgctttctttttaagctgcatctgcctacaatactcatcttgaaatcactttctcaaaaatcctaagattaacactagtttcatgacaacatatataaaatagcagttcaaagaataatttatcatcttctgagtttttgggaccttaccgtgatggttaatttgattttttaattatttagttgacaataatatatgtttatggtgtacaacatattttgatatatgtatacattgtggaatggctaaatcaaattaattaacatgcattaactcacatcaacttttttgtggtgagagattgttcactttatacgtcaacttggctaggccatgattccccaatatctggtcaaacacaagtctaaatgctgctgtgaaagtattttgtaaataattaacatttaaaccaaaagacttgagtaaaaaagattactc

SEQ ID NO: 188 - DNA, 493 bp, Homo sapiens
gatctgtgggcagtattcttagtaccggggattcagtagtacaaggcggcaaaaaacctgtactcttctggaacttggatttaaatggatattgatggtatctgaaggtatttcattacagggataataatcttcacattctccataggcacacacacacacacacacgtttgtacatagacacacacaaatatacatagggacactaatgaggtgaacaaatacccagtagaagacaatacagaaaacggtgataaaaatagaaagtaagtgaataaaatgctgacataaataggagtaaatggaataaagttgagaaaaataaccaaatagtttgcttaagggtattgtgtgaaccaacgaaatttgatttgaattaaatttagaatgataaataaattgtatatatgaacagagtggttaacatgtaaggctagcagtaagttagattaagtagaatacaattttattgaatctaagactcctgctttac

SEQ ID NO: 189 - DNA, 588 bp, Homo sapiens
  misc_feature 431: n = A,T,C or G
ctgctggcaaacatagtatcttccctgtcttttctgttgatcaggaaacacaattagccagagataaagcatactgtgggtggtaaagtaccaagaaccacacgaacatgcagccaggtccttatcttgcagaagagtgacggagtgaagagaatatttgaatgtccctctcccaggctaccacgtaagcttttcataggtaaagacctttactttactgccaagcaccatggatggcccagagttggccctcaagatctttttatgaaacctacagaactaaagtgtatatattcagggagctgtttgataacatatatattcagggagctgtttaaagtgaaaaagacagacaggattctagaaccaaacatctgacttcttcctttctgcattcattcagcatgtatttgtgccaggctgtcttgtangtgccacggacacaaccctaaacaggacaagaaaggtctctgctctgtgtgatgcattggcgtgccttaagaattcacatattaagtgatgtttagaatgaagattaacactaaattgtaaccatatttagctactaatactgtgaacactttggtt

SEQ ID NO: 190 - DNA, 467 bp, Homo sapiens
  misc_feature 328: n = A,T,C or G
gggggacagatacctttgtttagagtctgtccgtttttgaaaaccacgttgaaccaaagagaactgacattgcacatcaggttcagggaccaggcaatttctcttctgtctcttggtgtcacaatattttgagaacacagacacacaaaaggacatgaatataaacatccacctttttcctccagtgtttttgagcgacagcccctaagaagacatgctctgaagtctgcagaagtgggctaggtaatgttctcaggccacatcaggggaaattacagtgagtagagttttttgtttttttgagacggagtctagctctatcgcccangctggagtgcagtggcgcgatctcgactcactgtaagctccacctcccgggttcacgctattctcctgcctcagcctcccgagtagctgggactgcaggcgtccaccaccacgcccggctaatttttttttctattttt

SEQ ID NO: 191 - DNA, 357 bp, Homo sapiens
gagctgaaattataggcgcccaccaccacgcctggctaatttttgtatttttagtagagatggggtttcaccatgttggctaggctggtcttgaactcctgacctcaggtgatctgcacccctctcagtctcccaaagtgccgggattacaggtgtgaacagccgtgcccggccaggctttgtttctctattaattacagacctgattgtgctggtccagtggctttcccttccttacagaatagaatgcagattgctctgcatgacataccatatcctctggtctaaccatcgccccatctttccacccttattttcaaaaatctcctttctgaattctttttttttttttaaaac

SEQ ID NO: 192 - DNA, 430 bp, Homo sapiens
ctcctgacctcaagtgatctgcctgcctcggcctcccaaagtgctgggattaaaggtgtgagccactgtgcccagcctaattcagttcaaattccaagctaggggtttcatatcctatatgtgtagaacatgacaaatatttaccaaatatactttcattaaaatctgaaaggtgaaacctcaatttaaaaaaaatctcctacttaaaaacaatgaagttttagtttgccacattatctttaaaatacaatatgccttattgtgtagcatatctcaaactttaaaatatttagtttaggccaggagcagtggctcacgcctgtaatccgacactttggaaggccgatgcggtggatcacttgacgtcaggtgtttgagaccagcctggccaacatggtgaaaccccgtttctactcaagatacaaaaatt

SEQ ID NO: 193 - DNA, 506 bp, Homo sapiens
aaacattgcatataagaacatacagagatgggctgggcttcccaaagttctgggattacaggcatggatcactcctcccagccccaagcagattttatatcatgatactttgggccagccctcttctgatataaatggaatgcttagctgtagatattgagagattatcctgtttccaaagaactctcacttatccctatcatttccagttattctccattcaaaactggctgggcttgctgtcttaatctatttgggctgctataacaaaatattataaactgggtggctaataaacaacataaacttatttctcacagttctagggactggaaaatctaatgtcaaggtgtcagcagatttggtgtctagtgatggtgtacttcctgattcatagacagcactttcttgctatgtcctcacgtggctatagatacaaggctctggggtctcttttataggcactgatcctactcatgagggctctgctctcataaatcacctac

SEQ ID NO: 194 - DNA, 541 bp, Homo sapiens
atcttataagaattgccaagacttgatggctaaggactcaggtttagaatataataaggaaaggtcttctgcttctggctatgacagagttgctagaatcagatgaattcatccactgagaataactataaaacttgagaacaactataaaacttggacaaaatacaaagcaaaacaaaacaaaatctgaaagctctgtagaacaaccagtgcagccaggacctcagggaccaagatcctggagagaaggaaaacatattgaagtgagtactgctctgagtacagctatttcgccttggaatgtttgctgattcaaggcttggggcatagaggcataaaaaatgacgcattcttgagcctgtggcagttgtactgggctgaggaaaccaaaaatggagttcagagttaaattaagcagttattacatgaggggccaagatctagagaaaagtactatggacagctaaaaccaatattctatgtgcatttttccttcaaggcattttctgatatccaacaggctaaactcaagacaagacac

SEQ ID NO: 195 - DNA, 201 bp, Homo sapiens
agttgccagcattctccagatggagtgtttccctccgcagcaccccctgctggtcagtttgacaagcaggtgaacagaagttctcaaatacacaatagtagattctatcaatcaagttgcataaagagttctgattcccagagagatgaggtctcactatgttgcacaggcaggtcccaaactcctggcctcaagcgatcc

SEQ ID NO: 196 - DNA, 550 bp, Homo sapiens
  misc_feature 436: n = A,T,C or G
ctctcatcaactgggacatgagtgagaggtaacaaagtatagacaacttttttaaagggtttaactgggatggggaacagataatagaataaaaacaaatattgcatttacagtgaaaatcaggtgtttatcaagtggcaggtatttgataaagtttttgaactgagaagtaaacagcaaagaataaaacagagagactgagggagagaaagataataacaatagtgcagaagtattaacaagactgaggtagaccaaaaaagatacataaattagaagaaaagaaataagactggatgtgactacaaataagtatatttatagatcagagtaagaagctgaaggattaatttcaatgtccaggttaggtgcccccatctttatgctttccacattatctggttttaaaatttcttgcttgctttgggaggctgangcagatggatcgcttgaggccaggagtttgagaccagcctggccaacatggtgaaaccctgtctgtactaaaatacacacaaaaaatacccgggcctggtggcatacgtctgta

SEQ ID NO: 197 - DNA, 516 bp, Homo sapiens
ggaagagtttaattttgttttctagagtcatttcaatataaagagttttttatacacagcacctattaacatctggaagaaatagtgttccttaaagtatactttcagtaacatagcattagcttgtccatttccaaacctacactgttttagaatgagtgttggtaatcatcaggataggcactgggaaaggattggaagcagtgggatttgtttttagggaggtcatagggaatttaaggacttaaagatcaagaaggcatctaatagggttctatgtaaagataagagacaactaaaacaatcaggtaagaaaccttttgatccaataattctgttaaatcttccaagatatgtacatcaaattatataggcatcccttggagctattgcggcttcggttccagaccaccacaatgaagcaaattccacatgaaagcaagtgacacacactttttggttttccaatgcatataaaagttacgtttgggctgggtgtggtagctcacacctata

SEQ ID NO: 198 - DNA, 632 bp, Homo sapiens
agggccctaactgctgaaggctagagtaaaactgatgggaggtgggtgggtattgaatggagtccgtggatttggaggtaacaggagtagcacaaggtgacaagggtcttcactgaaaacagaggatgaagtgaaagactgtacccagaatactgatggctagaagatttatggatccctctcataaggcacttgttgaaagaaagatctgtataaaaatggacctttgaaaattctggtctaataacatcactctgagacttagcaacagtaacccttgcccacatatatagcctttacattcagctttcatgggacttgctgtcaaatgttgatagccaaggttcaacagacatttgaaaaaagtacctttaaaacggggacaggtaacagaaacattaagaaaactggagctaaaagggagaaactggagagaacagatggaagtttgacaacactaagacttacagagataaagaaaatagtgcatccatgaaataagactagaatgctggaaaaagaaacagacggagaaagaactcttataaataaaaaatatataaagtaaataagcgatagaggggggaaaatgttaataagataggtagaaaataaggaaatctacctaaata

SEQ ID NO: 199 - DNA, 466 bp, Homo sapiens
  misc_feature 330, 365: n = A,T,C or G
cagaggggctgaggcaggagaacacttgtacccggaaggaggaggttgcagtgagccgaaatcgcaccactgcactccagcctgggcgacagagcaagactctgtctcaaaacaaaaaaagaaaaaagtcagcacaagtcatttgaaattatggtaatggtaacaattcataggggtcaccatattgtatgtttatgtcaatattctcaagaatatgctaaatagaaatcaagtgtaagtatggtaaatcttacaccttttctttacctctaatgaacagctttggaagaaagtaattactgtcgttatgggaagtcttaaaacccttantggccaggcgtggtggctcacgcctgtgatcccancactttgggaggccaaggtaggtggatcacctgaggtcaggagttcaagaacagcccggccaacatggtgaaacgccatctttactaaaaatacaaaaatt

SEQ ID NO: 200 - DNA, 511 bp, Homo sapiens
tatgtatacatatatacatacacgtgtatacttatatatacatatacgtgtacatacatgtatgtctacatgcatgtattgtgtgcatacatgtatgtctacatgcatgtatgtgtgtgcatacatgtatgtctacatacatgtatgtgtgcatacgtgtgtgtacatgcatgtgtgtacatacgtgtgtgtgcatgtatgtatatgtgcacgtatgtatgttgcatgcatgtatgcatgtgtatatatgtatgtatgtgcctgtatgtatacatgtatgtatatatgtatatatgtgcctgtgtgtatatatacatgcatatatgtatatatgtacatgtgtatatagatgtatgtatatatgtacatgtatgtatatatacatatacacatacacacacataaagatcaagtaggttacattatatgtttgttttacatgtccatacttctatgaagatgggtctagagagttgtgagtagacgtggtcctcctatagctaatccttgg

SEQ ID NO: 201 - DNA, 606 bp, Homo sapiens
  misc_feature 511: n = A,T,C or G
gcagggactgccaacaccagagcagctcggaaatgtctgcatctttgaaagaagggatgcacgcattccacagctggccccatgagaagggtacttggccaagaagtccccctgcagagccacactctagagaaacgacatcactgagctgagtgaatgtcagtgccagcctccagcactgttgagattgtttgcgttgtgtttttaataaagagaaatggtgtgaaattctatggaggaaagaaaattttccaggttaactcaacttgggtggtgttcctgaagaccagacattcaaagcagtgctgttttattcttcatgtttttctttgactctgctttgagaggtcagagtgtcagacaataccagctacataatttgcagatcccagtgaaaaatgaaaatgcaagtctccttgttcaaaaattattaaaacttttggccaggcgtggtggcttacacctgtaatcccagcactttggccaaggcaggtggatcacctgaagtcangagttctagaccagcctggacaacatggtgaaaccctgtctctactaaaactacaagaaaactagccacgtatggtggcacacgcctgtaatccc

SEQ ID NO: 202 - DNA, 538 bp, Homo sapiens
gatcccagcactttgggaggcagaggtgggaggattgcttgagcccaggagtttaacaccagcttggccatcatggcaaaactccatctctaccaaaataatacaaaaattagctggacatggtggctgacaccagtggtcccggctactcaggaggccaaggtaggaggatcgcttgagcctgggaggtggaggttgcagtgagccgtcttcatgccattgtaccccagcctggcagagtacaggctgtacagagtacagacagatcctgtctaaaagaaaaaaaagagcaaatgtttactgagtactttaagttttctccagcaaccatgaggcttcttcttggcaaacaagattcagtcagaaaaggatcacaattaccctattactctgaagcagaatgcttgtgcccttcatgctgagagtagctaggtggttaattgcaaaatctattaagttaatatggacagagagagaatagtttgcttttcttaaaaatcaaagtttagccagtgcggtggctcacgcctgtaatccc

SEQ ID NO: 203 - DNA, 499 bp, Homo sapiens
acagagggggattgattgattgatttttgagatggaggttgcagtgagccaagatcacgccactgcactccagcctggcaacagagcaagactctgtctcaaaaaaaagaaaggaaagaacagtgaagttctctgcccttgtatgattccatgataattacaagtgtgtctatccccaaagtttctatgttaatacctctctacttccagttcttagaagggaagaatgaaacaggaaaacttcggctgcttctacttatccagtttataatcttaaattttggcatttgggtcaagtttattgcgtctgtcctctattttcctgccataatcactcagaatttcatgatgtttttcctacttcaaagaatatatttcctcccatttaaattaagtattttgttcaatcaacgaacacaggttttttaatattacagtgctagttactatggttaagatttaatactggccagatgcggtggctcacacctgtaatccc

SEQ ID NO: 204 - DNA, 501 bp, Homo sapiens
gtatgatattttatagaatatatgtactattaatcattcctccattaatggatatctttcatagtttttcttttctttttaatttttttttaacaaatagagatgggggggtctcacttgttgcccaggctggtttcaaacttctgggctcaagcaatcctctgacctcggcctcccaaagcactgggattacaggtgtgagccactgcgcctggcctttttctttaatttaaaaaaaaaaaaaaacttttttctgaaatatcaatagtaggcaccctggtaaaacatctttatatattatgctagtatttctgcaacataaaaacctggaggtaaaatcactccattctactcgtatggaaaatgtctaataaaagtttccattgtgaaacaggcatgtgagtcattaattaggaccctgatttgggcaggcaatatgtaaatacgggatcacttgaccccaggagtttgagaccaatctaggaaactggcaaaaccctg

SEQ ID NO: 205 - DNA, 676 bp, Homo sapiens
  misc_feature 459: n = A,T,C or G
gcttgttcttttggccgagcggcctacggctgcgagaagagacagaagggtgactttgtttgggccaaatgttggtgatcataggaccgatgataatacgttttcattttctttaaaatagagatggggtggctgggcgtggtgacttcgcctgtcttcccagcactttgggaggccgaggtgggtggatcatgaggtcaggagcttgagagcagcctgaccaacatggtgaaatcccatctctactaaaaatacaaaacttagctgggtgtgtggcgggcgcctgtagtcccagttactcgggaggctcaggcaggagaactgcttgaagccgggagatggaggttgcattgagctgacatcgtgccactgcactccagtctgaatgatagaccgagactccatctcaaaagaaaaaaaaacagccgagtgtgcagtgactcacgcctgtcatcccancactttgggaggcgaaggcgggtggaacatgaggtcaggagttcgagaccagcctgaccaacatggtgaaaccccgtctctattaaaaacacaaaaactacctgggtgcgtgatgggcacctgtagtgccagctactcgggaggctgaggcaggagaatggcgtgaacccgggaggtggaggttgcattgagctgaaatcgtgccactgcactccag

SEQ ID NO: 206 - DNA, 606 bp, Homo sapiens
  misc_feature 324, 502: n = A,T,C or G
gacagaggggtggccgaactgtggtatgtttgctctgtcaagactgttgacctttcatcgttacatttaattgatttaaaagaaatttggcatttggaagtattcagaacattaaagagaacgtcgttttttgagacagagtcttgctctgtcactcaggttggagtgcagtgacatgatcatggctcactgcagtctggaacctctgggctcaagcaatcctcccgcctcggtttcccaagtagctgggactttgggtgtgtaccacccacacctggctaatttttaaattttttgtagagacggtttctctgtgttgcctangctgatcttgaactcctggactcaagtaatcctccctccttggcctcccaaagtgctgtgattgcaggcatgagcccctgtgcctggccataagaaaatatcttggccggtggtggtggctcacgcctgtaatcccagcacttacggaggtcaaggcgggtggatcacttgaggtcangagtttgagaccagcctggccaacatggtgaaacctcatctctgctagagatacagaaattagccaggtgtagtgttgtgtgcctgaagtcccagctgcttggg

SEQ ID NO: 207 - DNA, 497 bp, Homo sapiens
acagaagggagaacaagtcattttgaagaaaatacatgcttaatattacctatgaagaattaaggagaaggaagagccagagataattgtaaaatttcaaagccacatgttagtaccattagcagaagttagagaatcagaaacaagtgttatatatgaggtggaagattatgagtgtactttagggcagtctgagtctgcaattccagaaacattcaagtggaaattattgtagttagcaaaagcctgaaacatgagtgagaaagaagactagcaatttggggtgggatgggaggtgggggcgagggtgttatcatcatcattggaatgctggttaaaagttctgagagcctaaagaagtcacagcagagtactaagactggagcttttggagaagttcacaaaggatgggaggagccagcatggaagatgaaagaggagaagcagcggtcagtgaagtaggatgctgtagtgtcaggaaaggtcagatgtggcag

SEQ ID NO: 208 - DNA, 584 bp, Homo sapiens
  misc_feature 85: n = A,T,C or G
gggcattacaggcatcagctgccatgcctggctacaaatcttaatgttttccccatggcttctttttctggcgttcttttctcangtaatggaagtgggcagagaatgatcctttccctaagctccagtgtgtaagaattaaagaaagaggaaagaaacacaatggcttgatggtcgaggacaggtttattttaaagaaaacaaacccaagagtggcttctggctgagttagatcagaggcatgctctcttacagactaagagtttttaaggattcagggtgggagagtttatcagaagcttggactgcttctgtgtctctttaggtgtgcttatctgggaaggagttgtgtgtctgtttccatacatcttcctgcagctgcaggcatacccccaggtctgcttttagcttccctatcttagtgcacctgaagggaaagaatgtgcttattaaggcccactgttatactggggcccaatgtatgaaggtgaagtttggcaattacccaagagactttccccccacctccctctgtgcctgagctgtctcatctatgttttactgtctgctctttctgactgctt

SEQ ID NO: 209 - DNA, 636 bp, Homo sapiens
cgacagtaagggtatacataagcattcaagttgttaccttgttagtgacacataacattttatgatttatttatttctagtttagataacggaacaaatctgtttgagtatggtactatataccctgatagacagtacctctctcagggtagatacaaattgcaaattagagttgggaaaaagtggcccaagcaagtggcacaaaaagtcacttgcagataaaaagctttctgtgagtatgttacagtgaaactttcaatgaagatatgtccaaatgcagttaatcagaaaccagccaaactagcctaaacatttatggatattacaaacattcttccaaaaattttttttcttctgctcaattttgtgctgttttaaatgattatatgtaattaattttcaaggaacttagttgagccaaatgtgaatcttttgaggttttcctattgctagcaattgcttcattaagaatatgaaataggcacctggtttttttaatgctactgttgagaatacagtgaatgagtcctatttataactgaattaaaagcttaattaagtttatgagtgttttaaaactgtataaagttaatgctaatgtatttattaaaagtaaaaattattaatacatttttt

SEQ ID NO: 210 - DNA, 606 bp, Homo sapiens
  misc_feature 473: n = A,T,C or G
cagaagggttccctaactcgaggcctggcaccagtttatctcgtgcactctggaaaccaggacttttttttgacatttcactctcccttacctcttcttttcaatctcaccagattctgtttattttttcttctaaatgcctttcaaatttctccacccagctccctttccatttctctccctatcgtctctcatttggagagagcgagagctttttgtctcccaacatccagcacccattccttaaatccgtttctccatcagtctttaagacgttagaagggagagaaacaaagaaaaaagaaaaacttcctttcaatcacatctttctaggttttcactttaagggtaaagactaaaatgtttggcaagattcagcaagccttgtgtgatacagaagatacgctccctcagagaggatccgagtccgttttgtgtattcacatatcccaagtgcctagagcagtgcctancacagagcttgtgctcagcatatatttgctatggaatctgactcctgctcttgctgtggctcattggcctttcatttccttgaatgtgattttattttacctgggatgctcttcttctccattcttggctgac

SEQ ID NO: 211 - DNA, 184 bp, Homo sapiens
acagaggggtagatcaaaccactagccttcattagcttgaaaatgtgacacaagttatatcttgctgagacgaggcctctacaatattatatttttctgcttttctcctagaatgaattaaagacttaaatcccttgttcctagcattcaaaatggtctctctctctctctctctctctctctc

SEQ ID NO: 212 - DNA, 553 bp, Homo sapiens
gattacatccaagtcgatttatatattttaggataccaaattctgtctaatgtcaatgagggtgtgtgtggccagggtagcacaagacaaggatttgggaataagagaaaaacaaacataagtttactgaggtttttttttggggggggcgtgggggcacagtcttgctccgttacccaggctggagtgcagtggcatgatctgggctcactgcaacctctgcttcctgggttcaagtgattcttgtgcctcagcctcccaaggaactgggataggggcccaccaccatgcccagctaatttttatatttttagtagagactgggtttcaccatgttggccaggctggtcttgaactcctgacctcaagtgatcctcctgccttggcctcccaaagtgctaggattacaggcgtgagccactgcatgggccagtttactgtggtttttaaaagaatgaattttaatattgtcatcttcggtaacaagaagaaatgtggcacatttttctcaaaaacgcagtgataattacaaaaatctgctccattcctttct

SEQ ID NO: 213 - DNA, 525 bp, Homo sapiens
  misc_feature 461: n = A,T,C or G
gggccacctgcatcgcggcccaacctgtctggggcctcgtcctctctcgtgtacacacaggagctcctggcaccccggagggtagcccccaaccctgaaacacacagcggcagcggcctgacctccccggcactctctacgtcatgtgtctcagatggggacctgtgagtcccggaacctgactcacgggtggtgtgtctctcgggaccaagtggatgttgagataccagccggacagctattataccaatgcagaaagaaggaaatggtggcttgggtactagtgccgggggacgggggagaggacatggttgcttgggccaaaggatggtgctgaagtggggagaaggggtctgattccagatggagtctcactctgtctccaaggctggagtgcagtggcacaacctcggctcactgcaacctccacctccctcattcaagtgattctcctgcctcantctccccagtagctgggattacaggcgcatgccaccacgcccggatgatttttgtatttttagt

SEQ ID NO: 214 - DNA, 514 bp, Homo sapiens
gggcactgggggtggggaaggagtacagtgtcctgtggaacaagatgcatcagagtaggaatattttctccagctttaaatccagagagcaactgagtgcttctccttgaaacttttgccatctaatactctttaatacatttattttttgcttaaactagtaggaattaggtgtgtttgaaactaagaattttgactgaatgatatggtttggctgtgtccccaccaaatctcatcttgaattgtagttcccattatccccacttttcgtgggagggaccaggtggacatggttgaatcgtgagggcagtttcccccatcgtgttctcatgatagtgagttcttgggagatctgatggttttataaggggcttcaccctttgtagcaggaggagctgcagacaagaacccctcagacactgagttgtagaaggaaaggctttattcagctgggagcatcgggagactcatgtctccagaaaccgagctccctgagtgagcaactcctgtcctt

SEQ ID NO: 215 - DNA, 564 bp, Homo sapiens
  misc_feature 429, 469: n = A,T,C or G
gtacctatgtataaaactcagccccatatccaagcttaataccaataccatatccagtattaatatacaaagtatgcttctacaaactagtggggtctttgccacagaggaccatattggttcccccaaataaccacaatatgatggataaatcatgatgggaataaaagatctctgagttctagggttaaatgtttttgacttcccttactatcaaagttttccagggaaaagagcaggattgcttccctgttattgtggactcccttcccatgatcttaacagaacaactggccaggcgcggtggctcacgcctgtaatcccagcactgtgggaggccgaggtgggcggatcatgaggtcaggagatcgagaccatcctggctaacacggtgaaactgtctctactaaatatacaaaaattaattanctgggtgtgttggcgggcgcctgtagtcccagccactcangaagctgatgcaggagaatggcatgagcctgggaggcggagcttgcagtgagtcgagatggcgccactgcactacagcctgggtgacagagtgag

SEQ ID NO: 216 - DNA, 536 bp, Homo sapiens
  misc_feature 432: n = A,T,C or G
gaacaaatgaagacagtacatattaatttgttggaaagaaaagtggtttgaaattaactagatagggcatatattcaaagtgttttggtaggaggggaaaatgtgaggatatttacatttggaaaggaagtatctgttgagactgtgtagattagagtgatccatcaaagagaggacaatttatagagcaagttcctagaagagatgatagggatttgggccaaggtgaaaacaagagaaattggctttaatcagaatgttgaaacctcttttgagattaaaaagaaggagagattggtgaacagatagatttattgggaagctgaggacatttttagtttatgttttttgtttctaagtaattaggcgtagtaatatgcttaaaagattgaggaaaaggctgggcatggtggctcacacctgtagtcccancactttgtgaggccgaggcaggcaggatcacctggggtcagaagattgagatcagcctaaccaacatggagaaaccccgtctctactaaaaatacaaaaattag

SEQ ID NO: 217 - DNA, 565 bp, Homo sapiens
gtgctatatacataacatatacctatatctatgttatgtgtctgcttatatactttatatacataaatatgtgttatgcatatatgtatgaacaagaatacatctctaaaccttataaatattccactgttctatataaaagagtcaactgacgtaaaaagttgactcattttactggtctttaaaataggggcttaataactctgaaacttatgatttctcatatactttgacttcaaaacttcacttgtaggaatttatcctacagatatggccacacagaaaatgacatataacatattaagaacattttctaatatgaaataattagatataagctaaatagttaacgatatagaactagttacatatattatgaacaacagaataccctgctaccataagcaaaatgaggacttttattaatataaagtatatacagaagataaaaaggtagagtgcagtaatactggtatgcttacatttatattaaaagagaaaatattatgtatttaattaaaaatgcatattaaggctgggcgcggtggttcacgcctgtaatccc

SEQ ID NO: 218 - DNA, 502 bp, Homo sapiens
  misc_feature 101, 184, 216: n = A,T,C or G
agaaagctggctgggtgtggtggctcatgcctgtaacctcagcacttcaaaaggccaaggtgagtggactacttgcaccccaaagttcaagaatagcctangtgacatggtgaaactccttctctacaaaaaaacaaaaattatctgggtatggtcacatgtgcctggagtcccagctacccanaaagctgaagtgggaagattacttgagcctangaggtcgaagctgcagtgagccatgactgcaccactgtactccagcctgggtgacagagcaagaccttgtctcaaaaataaataaataaacaaacaaacaagaaagcacaatacattcagccacaaaacacaggcatcagatatgcaagaatcctgacagcagaaaatggctgaagcacaatatttacaaggcaaagggtttctgactaaaataagacagattctaacaacatactgtttacaagaattaaatctaggcaaggcacatcggctcatgcctgtaata

SEQ ID NO: 219 - DNA, 571 bp, Homo sapiens
acagtagcatgatcttggctcttggtaacctctgcgtcccaggtttaagtgattcttctgcctcagcctctgaagtagctgggactacaggcacgtgccaccatgccaggctaatttttgtatttttagtagagatggggtttcaccatgttggccaggctcgtactgagctcctgacctcaagtgacccacccacctcggcctcccaaagtgctgggattacaggcatgagccaccacgcccggccttcaagtctttattcttattgtcaatttcataatgtattctctgtcatctctctcttgggctagcattccagctggtttcccttccttggctctaccctctgctgcccctcctgccagcaaaattattcctccaaaacatagatctaatcatgtcatccacccagctaccctgcttcaaacgttccctttccattattcaccatggtgaaagggaatgcctaaattccttaagtgggtggatgccttccaacctgaccccaacacatcactttgtctgtttcctgtcattgatgccctggaactgcctacttcaaccacaaata

SEQ ID NO: 220 - DNA, 607 bp, Homo sapiens
gtggtggcctcctcgctctgccctacatatgctaggcattctcttgcctctgagtctttgtaattgctgttccctctgcctgggttgctcttcccacatagttcatttccacactccttcaggtcttaatcgaacatcatttgcctctcagtgaggatttcctagtcaccctctcaccctaccaacctttttgtttttttccatagtacattgtcaccaacatgtcacatactttacttaccttggttattatcgtctcacacgttttatcagaatgcaggtatcttgaaaccaaggaattgtgtctgttttgttcactgctgaatccccaatgattggaacaattcctggcatataatagatgctcattaaagaagttttaggagaatgaatggatcaatcaataaacaactactaactggaaaaatataactgccagcatttcatatttgttcacaatgtccatgtgtataatggcattcacaacattgaaacagaggccaaagtactaaaagcatttaaaaggtccctggaaaataataaagatatattgcagtttttgcattgttgggaatttgtcatttcatattggaatacattcttaaat

SEQ ID NO: 221 - DNA, 566 bp, Homo sapiens
  misc_feature 426: n = A,T,C or G
ggaaaaagccccagtgctctaaaaacaatagggaaaggtcctgagcagacaattcacaaaagaagattccagatattcaaaaacatgtaggaaaatgaatatgaagacatgcaaataaaaatatcattgtcataatgtgttatctagcaaactggcaaaacttgaaatccttcacttgaaaaagtgaaggattgggaaccaagattctaatctaaacttctagtatccttctagaagtttaaatagttgttaactttatgaagagcaatttggaatatgagtgaagacaattaaaagattgggtgcatgaatatgtatcatagtttcattaaacacttcaaggaattggaaaaaatctctatgccctaatgtgatattaaaacatgattttgggccgggcacggtggctcatgcctgtaatcccancactttgggaggctgaggtgggcggatcacctgaggttgggagttcaagaccagcctccccaacatggagaaaccctatctctactaaaaatacaaaattagccgggcatggtggtgcatgcctgtaatcccagctactt

SEQ ID NO: 222 - DNA, 517 bp, Homo sapiens
  misc_feature 308: n = A,T,C or G
ggctcggaggagagggagggcctcgccctcttgtggtctaagggaggaaaggatggtctccaaccagatgccccacctcattcaggccttcctcactgggccccatctggagttctcctgtgcacaccacagcccaaagattccagtaagtccggctgcctgggacaggccgccaggtcggccaaggatgaccaagaaaacaccatttggccccatcctggggagaaagaatgggcatttgtgtggccaggattaggggtggactaggggaggggacgtgtcagtgtgtgtgtgtgagtgtgtgtcanggtcggggtgatggtgtgtgtggacatgtgagagggtttcagtgggtgtggcatatgtgtgtgcaaaggtgtgtgaatcggtatgctggatgtgcaagtgtgtgtgaacatgtcggtgtatctggatgtgtgtgttaaaatgtgactaggagtgtgagcatgattgtgtgttttgtgagtgtgttggcacctgtgtaagtctgtgtgtg

SEQ ID NO: 223 - DNA, 626 bp, Homo sapiens
aaaacatatcatataaatattaatgaaattaatcaagagtgattacaataatattaccaggatagagtgaaacattatttaatgataaaaagtacaattcaccaagaaaagtagcacttctaattatgtatgaatcaaacaatagagctgtaaaatacatgaagcaaaaactgacaaagctgaaaagaaaaataggaaattacactattacagtggaaaactttaacatttctctctcagcaaatgatatagaaattaggcataaatctgcaatgataaaaaactcaacacatgattaaccaaaaggatctgatcaacagtagacaatgaataatacacagtattttcaactgcctatataaattatactaaattagactacatcctggaccagaaaagaaacctcagcacatttcaaagaattaaaatcatacacagtatagtctccctctacaatggaatcaaactagaattcacaaacagaagagttagttatagtggcatgtgcctgtagtcctagctaccagatcagctgagagaataaatcaatgaaattgaagagagaaagaataatagataaaatgaacgaaaatatggttctttaattatcaataaaattgacaaag

SEQ ID NO: 224 - DNA, 538 bp, Homo sapiens
  misc_feature 121: n = A,T,C or G
acagagggggtgcacctgctggcaccagtgaggctccgttccttaaaagaagcagcgggggtagtggacgggcacaggctggacaccaggagagattgggatcagtctcctctcctctcangcctctgtttcttcatccaaaaataaggggatgagatgaccccctcccttaggttcctctctgagtgtcctcctatgggtaagtcagctcaggacagactgccagctgagcagggagaaaaggagtgcaagagaggaatggcctggatctcaaaagaaaggtttactggacaggatgatgacgttggagcagtattgcccggggtcccatctgcacagggtgagctgcgtggggcagtgttgggagctgcagtcagactccaaagacctcgtttcagttcccactccatctgccgataaacaaccatatcaccttgggcaagtggctcggcctctccaagctttagtgttctcatctgtaaaatggagcaactaatactgtccctgtagaactttacagggtggcgtaagaattgct

SEQ ID NO: 225 - DNA, 556 bp, Homo sapiens
acagaaggctccctattaaaatccatctatagttataaatgctagaccaaaagaactgatactgatgaagcactatgtggtttgaattacaaagcttaaaatgtgtttactgtgaaatactaaggaaaacaaatggactaatacttctaagaaagatttgcaataacagttattctttgcttagctcaaaaagaataaggaaagtaaataagcataaatgtcttatttcctaaatattttaaggattttctgtagttttcctgcattcaaatgtttcaggccatacaagaggaaaaaaataggtgagagcaacagcaataattttaaatttggacctctcagtctaaaataatgctgcaatagccctttacccttttaaaacaacatttatcacacttgtaattattctattcagttgtgtgtcttcatgagattttggttttatgaaaacagtatagcataataggttcacagatggctctgccacttactagctgtgtgatcttgagaaagtaccttattattcaactgtgcctcagtctacccattgaaacat

SEQ ID NO: 226 - DNA, 559 bp, Homo sapiens
  misc_feature 497: n = A,T,C or G
gctttcttgactgatttttgtcacgatttggcaaaattataaatttcccaagaaatgccaggaaggaatttccatatggaaacatggcaatacagcctggaaaacactatggacagttgcatggacctcacagtaaggaaatctaacataagcttcacgctggggagagctttatagacaatggatgtcataaataggtttttgaagaatatgtagtagttatctttgtgaaagttaagggaagagaggattggagccattaattcacaggactgtgattaaactgagacatacacatttcatttttagggggaagttaaaaatagtttagtatgagttcaaatgtaggaggagagggatataaaatttgagagttaagcattggaccgtgtaagtctattctcatgctgttaataaagacatatctgagactgggtaacttataaaggaaagaggtttaattgactcacagttcaggatggctagggaggcctcangaaagttagaatcatggcagaaggggaagcaaccatgcccttcttcacatggtggcagcaag

SEQ ID NO: 227 - DNA, 589 bp, Homo sapiens
ttaaaaagttttaagaaattttaatgacagtcaggaatcacaaaacaaagtaaacaaggcatcatcgatagaaccagccaaaatagtagataacagaattaggtgtgtaataatctcagatattatagttgtcagaaagaatgtaaaataacttttaaagaaatggaaaggttaaaaatatgagtaaattgcaagtgaatataaaaatgacaaaaaaaaatctgaaaaaaactaaatagttctttgagaaataaacatataattggaatttaaaaaccagcaaataggtttaatggcaaactagacatagccagagcaggaattaagcaactggaagatagttctgagctttttgactgtgacccacagaaagaaattcacttactggcacatgtgtatgcatatgatacatgtgtatgatttaagccaaagtatctagaaactgatcttatcagttctctactaaaggtaatgttctctactattggcttttctcatttattctttttcattaaaaatgttgggaccaacccaggaaattttataaactgcaatgggttacgaccatagtttcgaaggaaactgattt

SEQ ID NO: 228 - DNA, 555 bp, Homo sapiens
  misc_feature 435, 509: n = A,T,C or G
gcttgttactttctaatattctctatattggataattagtttactaatttaccttatttattatctgccttccccaactaaaattaagtatcttcgaggcaggcattttgttttgttcacagctgtctccccagtgcctgcaacagcacctgatacacagtaactagtaaatatctgttgactaaatggatgtgggtgccacctgtctgattttgctcagatgacttgttcaaagcaggcctccagcttttatggttttctcttttcttttcctgtggcggcctattccttttccttctagagaccagtaaaaagttttcaaactcttgtatgtttttgttcctggtcatggaaatagagaagcagcagtatctatattttactaattgtattatgcatatattttttgagacagagttttgttctttcacctangctagcgtgcagtggtgtcatcacggtttattgcagcctcgaactcctgggctccagcaatcctcccacctcancctctgggtagctgggcctacagacatgtgtcaccacatctggcta

SEQ ID NO: 229 - DNA, 580 bp, Homo sapiens
  misc_feature 156, 424: n = A,T,C or G
gctgggcacggtggctcatgcctctaataacagcattttgggaagccaaggctaggagtttgggaccagcctgggcaacatagtgagacctcatctctaaaaatgtttaaaaagtagctgggcgtggtggtgggtgcccatagtcctagctactanggaggctgagatgggaggatcccttgagcccaatatcttgaggctgcagtgagttataattgcaaaactgcactgcagcctgagtgacagaacaagactccaactcacacacacacaacaaagtttttgctaaacagaagatatattttggggatatctggcaataaaaggagaaaatactccaggggagatggatatgggaaggacagagtgggacacctaagagaagccccacatgattttcccaatattgcctgggcagccctangagctgagggatgggacaaggagataccagcagcctgcagaaagctgcagagctgaacttgcacacacaccatccacggacacctgaatgcagcccatgtttatgccatagcatgtgctctctcttataagcctcatgcacccgctatgttccttt

SEQ ID NO: 230 - DNA, 591 bp, Homo sapiens
agaagggcaacacctgttgtgctaatctgaaatattttatttcagctaccgtgttcttaatataatttgtctccacattagacgtacaaagagaatataatttaatagtttgaagattatcctttcctgttgtattatgtgtttttcatctaactggctgacatacagcaagttttctctccaattatataattacctaaatagcatgacatctctgattttgcctcttgacccacaaagcctaaaatatttaagattttatcctttttggaaaaggtttgtcaactcctatttcagctgaaggatctaaagcccagaaaagttagatgatgttcccaaggtattggttacatccattttgtgtgtgtgtgtcttttggggtcagactattctgatattgtatggattctggagtatgtctggtttgaatcctacatccacccgttactaccctggtgatctagagcaaatgacttccctttgcctcagtttccttgtttataatatagtattgttgttagcattaaatgagataatatatgtgaaataattacagtgtgctttgcacatggttagtactccagttaactg

SEQ ID NO: 231 - DNA, 605 bp, Homo sapiens
acaaatatgccctggtaagagttctggccactgtgttttatacccaaaatgctaactctcccaaagacctgagatatactcagtttctccttctttttcaatataccagtttctctctctttcatgccatgattttttgtgacatggtcttctatagcttgggataagaaggaaaggtatttgtgaaaaggaatgaatatcctttattacaaacactggacctaaaaatgctggggcaatataaaatgaggagggcatacagagaaaattgttatgatagcaactttcactaggtcatgttgcggaaagaagcactgcaaaggtttgtttctagctctcactatatttgagcgatgggttggctgtggctctgttgctccttcatccaggattcaggctgaagtagaagccccatctgaaacatgccattcttatggcagaaggaataaaacaagagagctagcagaaccgtatgataaacctatggtttctgctccgtgcatgtgcgtgtgaaaaagcatatatcaacccactcacattctattggccaaagcaagtcacggccaagcttgaagtcactggacaggtaaacatcatcattgcta

SEQ ID NO: 232 - DNA, 678 bp, Homo sapiens
gggaacagttcactcctcactgagaactaataccaaagagagaaacagaatacattctaagatagtaccagaccttaaaaatagatgacatggagtaatggcagaagagtcaactatttctcaagggtaataaacaaaaattctatacacctaaagtacagtgctttatatttttcttaaaggagtgggtggaggaagggcttgggcttacagcttgcctggaggcttctcttctcttgagccctaaatgaatccttcacatcagcataccctgcccacttacaaagagccataaatcagctcttccctacaaaggataggtgtgttagaaaaattgatcggaatactgatacaggaaagccacgccaactacctttgttaaccaattttttatttaaaaatatgaatatataaccagtgacgccaaaaagaaagactagtcccaaaggaaatctaggaaatctaattcaaggtaaagaaaaaaaaagtttcaagtataattgcagtccttagaaagatttgaaattatttgtgttaaataaaaagaacagattggtatgaaaaagaggtaattacagaacaaatgaacacttgagaattaaaaatatgattggacaacaatagaagggatgataatagctgaagtctgaaacgttgaatataaagttgaaaactttt

SEQ ID NO: 233 - DNA, 552 bp, Homo sapiens
agacaatctaatgtaatatctgaaagcaaaacaaagagaataataatagtttgaggtctgaattatattcctctgccttttgatatgcattgccaaatttcctgtaagatatcctaatatatttatatagaatttacaattctatataaatattttaactttcttaatgttgtgatcttacttttaagaatctggcaacttaaattcatgactacttaaagaatcactttatccttatacatctaaagacgcgaaagtcttatttcctaaggaataattggaccaaaaatttttcaagccagtttacttaagtcattattttccctgtaactcagaatacattaactccagtatcaaaatgtaaccattatgattcctcatgtcttcatgactctctaaactgtgttgttaatcattttgtgataaatcttttcagcaaacctatgatgaccaaagttcattaggatcatcaagatgtggaaaaaaataacactaggttacattaaaaatggaaaacatgccaaattaactcttgcagataacccactgtcg

SEQ ID NO: 234 - DNA, 514 bp, Homo sapiens
cataagggggttttaattcagataaacacacaaacatacttctctggcacagccttcagaagcatcagtttttgttttgttttgttttgttttttgatacagggtcttgctctgttgcccaggctggagtgcgctggcacaatcacagttcactgcagcctcgacctcccagatccaagcaatcctcccacctaagcctcccaagtagctgggtctataggcgcgtgccaccaccatgcccagctgaattttgtattttttgtacagacagcattttgccatgttgcccaggctggtcccaaacttctagcctcaagcaaccctcctgcctcaacctctcaaagtgctaggattgcagtcctgagctactgccccctaccctctttgcgtcttaagagtcatttaaattttttttgatccttttgtttagtgcctctggagctgcttacaccaaggcaatacgccttgatatactggatggttgagaagcagcctctttttttttttttttttt

SEQ ID NO: 235 - DNA, 603 bp, Homo sapiens
aaggttgcaacatactcctgaaactgggaaggtgtggcctactctgcctatcaatagtatatcttcacacattcaaatcacaaatatttaactacttctcttttaattataaataaaataaattttatttttgccagttgtccttcaatttaagattaggaattagcaatataattataaaatcaaaagtgatttttatgtcctcatgttataaaggaaatagccacagaatcaactagagtatttgttttaagtgtaaaatgtgaggggaggatgattttttaaattgatacaaaataattatacatgtttatggggtacatcagatatgttgatatatgcatacaatttgtaacgatcacatcagggtaatcaggatgcccgtcacctcaaatatttatcgtttctttgtgttgggaactttccaaatcttctcttctagctattttgaaatatacagtaaattattaactatagtcaccctactgtgctgttgaatactagaacttatttcttctaactgtatttttatacctgttaaccagtctctcttcatcttccctccctcctaccttccccagcctctaataacctcattctact

SEQ ID NO: 236 - DNA, 639 bp, Homo sapiens
ggacaggaggatttttgcagagcttccatccagttcataaacaaagcaattcaatacatgtcttcaagatttctaaaggcaatgacttaattctaagttccatgaaagcaggcattgtgtgaatttctcctgcatctgaaactggcctagcacaccgagtaagtgcttgataaatgaatattatgaataaacacataaaagcataatatgatgtagctgcagaaacagaggcaagcaccaaactctacgacaatacagagtaagaaaaagcacagagactaagtgtcatttatgtatcaacagagaagtataccagggaacattctatctcagagaaactagacttgtgatcaattaatagcttgtcaaactgccagtaaataatgaataatgaaggtgggatttgagctcaaattgaagtaggttcagattccatacactttacactcttccacattgcctttcctttcctttctcccatggacagggtagtttttattagcttcctacagacaaaagatacaacccccctagcttaaatcaggaagaattagatatcctgaacagaccaataacaagcagcaagattgaaatagtaatttaaaaattatcaacaaaaaaagtccaggactagacaga

SEQ ID NO: 237 - DNA, 490 bp, Homo sapiens
acagaggggggaacaggtggtatttggttacatgagtaagttctttagtggtggtttgtgagattttggtgcacccatcacccgagcagtatacactacacccaatttgtagtcttttgtcccttttaagtgacatttataaggaattgttactagcatgagtgaaaattcatgcgacacgatagtgagggaaggcagtaacattctctctgtcaatagatattatatatatgcagtgtgatctcaactatgtaaaaatacctacattcatgtagaaaaggctggattttaaaaaatgaaagattagctaggcacagtggctcacacctgtaatctcagcaattttggaggttgaggcaggtggatcgcttgagcctgggaacatggcaaaaccctgtctctccagaaaatacaaaaattagtcaggcatggaggcatgtgctggcagtaccagctaccctggacgctaaggtgggagaatcactgcagc

SEQ ID NO: 238 - DNA, 491 bp, Homo sapiens
  misc_feature 358: n = A,T,C or G
acagaagggatactgtctttcattcaggaaagaagaataattcttatcacgtgaaatttatcaataatattaaagagaaaaatgaatcacttctaaaaatgtatcaatgactaagaatatcacttcatgtactgtgatgatgtactgttgatttaactatatcctctctaggtgtggaacagtaattaatttaataactatcttgagaataccttctatatgtaaggtactatgcaagcataataggtaatagatgtctcaaaacagaatatctaaactttaaatcttttgaaggagttaagatagtcacacattaaaaagtcaggccaggcacggtggctcaagcctgtaatcccancactgcgggaggccgaggcaggtggatcacctgaggtcaggagttcgagaccagcctggccaacatggtgaaacgctgtctctaataaaaatacaaaaattagccaggtgtggtggcaggcacctgaaatcct

SEQ ID NO: 239 - DNA, 655 bp, Homo sapiens
  misc_feature 497: n = A,T,C or G
gatcatcaaactttagcaacatcaaaatctccaggaaggcttgttgaaacatacatcattgggtcctaaccccatagtctctgattcagtaggtctagggtggggcccaagacttgcatttctgacaagttcccagatgatgctgatgctgctggttcagagttcatgcgtaaagcatgattcatatagaagaaatagtcaagagacagtttcaacaatacatttccctcaattcacccatctcaaccttaaaatttctctatatctgcatccactgtttcttttttatgaaaacaagtttatctgcccactgcactccaattcaattactcaaagactctttcccagagtgttttaaggcaagaagaaagctttggagtcatctctcaatagttgcttcttaaattaacactattgacatttggagttggataattctatgcagtgggggactggactgggtattgtagtatggttagtgagcctctatccactanttgcaagtggcactgcccccttcagtggtaataaaaaaatatgtctctagaaactgccaaatcacccttgttgagaaccactacactagtcaattgtatctttactctctccttctttgttgggaattaagggtgaaaattcatcgcatgccttcctg

SEQ ID NO: 240 - DNA, 421 bp, Homo sapiens
  misc_feature 239, 328: n = A,T,C or G
gcttgttaagtaacagattgttggggccaccctcggggtttctgattccataggtctaaggtggcactcaatagtttgcgtttatctcaagtttccaggtgatactgaagatgattgtcctgggaccacactttgagaataactggtcattttggagatggttggtggactatatgtaagtgagactaaagcatatttacactcttaaaaaataaaaagtactggtaaatgatccttanggaaaggaggtggaagatctgtatgaggagttgaaaaggaatgttcaggccgggagcggtggctcatgcctgtaatcccagcactttangaggccaaggcgggcagatcacctgagttcaggggttcgagaccagcctggccaacatggtgaaaccctgtctctactaaaaatacaaaaatt

SEQ ID NO: 241 - DNA, 580 bp, Homo sapiens
ggttgcctgcatctttggctctgctgtgatctgattggaggagggacagtctctggtatgtctttattggcagtgtgaaaacggactaatatacagaataaaagtaacttcaacatgtttcattttctcttggaaaagtgctatgcttaaaaagattgttgccaaatttatctttcaaaatacaagtcagatgttttaattactgtcttcagatgatttcagtgagtcctcaatattaaaataataaagcaaaacttctttaaatctttcaagccactagagagcttgctgtttttttttttacctgtttagtcttatctcaatactggcgctataactaattttctatcaacattacactgtccatacaattcctgacaaataaagaacacaggaagacaagcaggttcctccccgcaacacccgactttctttgatttctaagataggacaagaaagtctgattcataccaaacaagaaacttctgaaaacatgatgctgagcttcacaagtctcaaggctgagctgagttgtttactcatctaatagggactgcaaggccctcttgagctgggcatt

SEQ ID NO: 242 - DNA, 430 bp, Homo sapiens
  misc_feature 298: n = A,T,C or G
gatttgtttatggctgcatttgtgctacaacagcagagttgagtagttgccagagatactgagtgaactccaaagcctaaatatgtcctatctggctctttacagaaaaagcttgcaaacccatggtctaaaagatagtcatgaaagagtagctcatatttccaacagtagcagatatagtcagtgaaaatagaggaaattacactaaaggttgtaagaaggaaggaaaacaatcttttggacatgtaaaaaatacaaagtttgggccgggcgcggtggctcacgcctgtagtcctancgctttgggaggctgaggcgggtggatcacctgaggtcaggagttcgagatcagcctggccggcatggtgaaaccccgtctctgctaaaaatgcaaagaattggccgggcgtggtggcgggtgcctgtggtc

SEQ ID NO: 243 - DNA, 492 bp, Homo sapiens
  misc_feature 388: n = A,T,C or G
gcggctgtgattttgtagtggttagttacacggtattactgtgaccacagctgactgagataaggccacttgccagctatttgacacggagcaagttgctgcacctttctgagctgtagtttcctcatcaataaagaaagtggtactttatcacttgttgagaagatcagaatcagtagatggtgttctatacatagaaaatactaaaaaaggctgggtgcaatgggtcacacctgtaatcccagcacttttggaggccaagaagggtggatcacctgaggtcaggagttcgagaccagcctgaccaacatggtgaaaccctgtctctactaaaaattcaaaaattagctgggtgtggtggtgtgcgcctgtaattgcagccactcangaggctgaggtaggaggattgcttgaacccgggaggtagaggttgcagtgagcccaaatcgcaccactgtactccagcttgggcgacacagtgagactctgtct

SEQ ID NO: 244 - DNA, 563 bp, Homo sapiens
gctgtaaaatctgtaaaatgaagacagtaatacaaccacagagagtggtttgtgatgaatgtatgagataatttgtgcaaaactcttgaatctgttgggcacagagtaaatatttgaggaatgttaactgttattattattattacttttattggccagggaaacattttggaaggagatgaatgcttgatctgaatcctaaaagaatgcagaaagaagatgaaaggagtctctttgtaaagtgcattgctagtcagtccaatgtttaaaagccaccaacatttcaaatgggaaatacttttatgcatgtttcaaagatgaggcaacagactcaaagaagttaaactttcccagaaaaccaatctagcacaaagtacaaatggaaatcaaaggtaaaagttttgatgccacttttgcatctataactctaaatagggctgcctgctccctccatttcctgttacctactaacaataagctgtgccttgccgggactattaaatcagtgcacctgcaaaagcaaacgctgagcttttctctgcccactcaactaaaatgcctcg

SEQ ID NO: 245 - DNA, 512 bp, Homo sapiens
  misc_feature 191: n = A,T,C or G
ggattacatccaccttccaggaagtctaaagggcaaaaagtgaggtcaaaagggatgagccagcctagtgtgctccttctattattagaaaaatgatagctttcttggaagaccctaactagtgagcttcagcttatgtctcactggccagaagtatgccatgtggcaatacttaactgcaggggatctangcgagggaggtgttttttcattgttgttttctcatgaggaaaaatgtatggctgcctggagcaaaattggggtgctactcataaagaagaaaggtgaatgtaggcagctggcattgtctggcatcctcccacgtagaaatgactcagacagacacttgcagaatgagtggctttaactgtggacgtgaagctttataccaagaggggaagatcaaggtctagaatcccagtgagaaacaacacagggattttttgctgatttgctcctaccatcatcacacaactattttggacatttagctcctggcatccacttgtctt

SEQ ID NO: 246 - DNA, 558 bp, Homo sapiens
gattgtatggattctggagtatgtctggtttgaatcctacatccacccgttactaccctggtgatctacagcaaatgacttccctttgcctcagtttccttgtttataatatagtattgttgttagcattaaatgagataatatatgtgaaataattacagtgtgctttgcacatggttagtactccagttaactgttagctattgttataattagtgtcaatgtgttgaattcataggctatcctaaagagaagggataaatgttcacatctgatccagtctcattttcttaaaatagcagcgatgttatatcatctgtaatctgaggaaaaactggcatttattcacattcttatttttgtagtatggtttattcatccttcttttcaataactttacaagttaatagaaattatgaacttctaaaatacatgcataatttataatattgattaacttaaacacagagcactcaaatgataaccacatagcacaccttccctgagtccagcagatgatagtgaaaactctttgttctctcatgctgtgtatcttga

SEQ ID NO: 247 - DNA, 602 bp, Homo sapiens
  misc_feature 437: n = A,T,C or G
ggtagtcccagctactcggaggctgaggcagtagaatcacttgaacctaggagacagaggttgcagtgagccgagatggcgccactgtactccagcctgggcgacagaatgagactccctcttcaaaaaataaataaataagccaaccaagaaggccgtacgtacagtggctcacacctgtcatcccatcactttgggaggccgaagcagggggatcacttgagatcaggagtttgagaccagcctggccaacatggtgaaaccccgtctctactaaaaatacaaaaattagccaggcgtgttggtgcgtgcctgtagtcccagctactcggaggctgaggcagtagaatggcttcaacttgggagacggaggttgcagtgagccgagatggcaccactgcactccagcctgggcgacagaacaagaccgtctactnaataataataattaataataataataatgataactagtgcaagagaagtacacaaatatcccaaacatttagtgactcagcagagggggccatgtctcaaggaacaggacttctacacctgttaccaccacctggggagttgtatctgaatctcaaggtcaggcc

SEQ ID NO: 248 - DNA, 516 bp, Homo sapiens
  misc_feature 297, 460: n = A,T,C or G
acagaggggtttagtacgcatgaggagcgctgctgcctctgttgggtgtgtgcctgtttaggcctcattactcctcccactcacagattttcgctatcccaaatggcttatctaccagccttctttgaattccttgtctggatatcttttccatttaaaattcatgtcagttgagcacccgaccaattgacacttttgggtttcagccaatacattgcttaaggtagattagaatggtaagtagatggcctggcacagtggctcactcctgtagtaccagcactttgggaggctgangcgggaggattgctgaggccagaagttcaagaccagccctggccacagagtgagatcccatgtctacagaaatataaaaataaaaaaaattaactggatatggtggtgcacctgtgatccaagttacttgggaggctgaggcaggaggatcccttcagctcangagtttgaggttgtagtgagctataatcatgccagcgtactccagcctgagtgaaa

SEQ ID NO: 249 - DNA, 470 bp, Homo sapiens
gaaaataagagtgtgaagatgtgattctaatgactaataacaactaaaacatttattaagtgctgattatttgccagctcttttgctgagggttttatatggatcctctcatgtattcctcataataaacctgtaaggcaaatactatgattatccccatttcacagataaggaaatatctacagaggagtatttgacttgatttgggccccataactaataggcagaggcactggcttttaaactcaatttgacacaattactctttatttgtataagaagtgagattattttcagtattgcaaaaattcactgtcaattaccaaactatttgacatagataacatatcaattatgtgttgtgagacaaacagcaaacataccttatgttcagaatcctttagaaaacactgagaaatatttagagaataagagagaaatgaatatgcctaaagctctccatgctcata

SEQ ID NO: 250 - DNA, 240 bp, Homo sapiens
gaaacacctataaagtatcaaaagaaaaaagttcaattaaaattttatacacagcaaaaatatcttttaaaagcaaaggtgaggccaggtgcggtggctcacgcctgtaatcccagcactttgggaggccgaggcaggtggatcacgaggtcaggagttggagaccagcctgaccaacatggtgaaaccccatctctactaagaaaaaaaaaaaaaaaaaaaaaaaaatttcccaatttt

SEQ ID NO: 251 - DNA, 534 bp, Homo sapiens
  misc_feature 421: n = A,T,C or G
gtgagccactgtgcccagctgccatagcctgtgcttttaaccactataattagcacaagaaaatttctgtccagagcgtagaagaaaaaaagcacactaaaatgttgactaagaaggagaaagaaaattaaatgtttggctttgtggcatgccaaataatggatagagaataaaattaaaaatagaactgacaatgaatattctttctctttgacaaatgatgagcataagggttacttaatacgagtattttctacctgcattaagagttctttacgaaaagctgattattagcaaaagctctactgtgacattagaaacacaatgagaatggctggtactctgtctgataacagaagaaattgccacttgtagatcagtatttaagaaacatacgtttaggcccagtgcggtggctcangcctataatcccagcactttgggaggccaaggcgggcagatcacgaagtcaagagttcgtgaccagcctggccagcatggtgaaaccccgtctctactaaaaatacaaaaatt

SEQ ID NO: 252 - DNA, 590 bp, Homo sapiens
  misc_feature 430, 465: n = A,T,C or G
agaagggatatcagtacccgtacaaaataataagttcttggaactggaaggaatcttagaagttgtctaatcttagaagttcaactgtctcattttacagatgaggagactgagggtagaatgaatcgaatgaccaccaaggtcttttgttcctcgtctcaaaaactgtttgttttacttcaccactagccctcgtatcccctgaggaccttcgcagcctggggagtgcccattgttaatccctggaggccccatttgaggggctttccagacagtctgggccatccgttgcagtcatcattggccagctgggctggagaagtgccctggcaggaagaagaaggctggtagaacagtagacctcactgccacctggtcaccttgtgcttctcccttggagtgttctgaccagtcatccgtgtcttcttanctctgctgttgcaggggttatttcgaagcaactanggtaaatgtctgggggagctggcttgtcctggctttcaaaccaccatcacttggaagagaaatgatgtggtttaatggttagtcagatcggagttagagatgtgttactgtctttgccacagtcc

SEQ ID NO: 253 - DNA, 670 bp, Homo sapiens
  misc_feature 453: n = A,T,C or G
acagttcactcctcactgagaactaataccaaagagagaaacagaatacattctaagatagtaccagaccttaaaaatagatgacatggagtaatggcagaagagtcaactatttctcaagggtaataaacaaaaattctatacacctaaagtacagtgctttatatttttcttaaaggagtgggtggaggaagggcttgggcttacagcttgcctggaggcttctcttctcttgagccctaaatgaatccttcacatcagcataccctgcccacttacaaagagccataaatcagctcttccctacaaaggataggtgtgttagaaaaattgatcggaatactgatacaggaaagccacgccaactacctttgttaaccaattttttatttaaaaatatgaatatataaccagtgacgccaaaaagaaagactagtcccaaaggaaatctangaaatctaattcaaggtaaagaaaaaaaaagtttcaagtataattgcagtccttagaaagatttgaaattatttgtgttaaataaaaagaacagattggtatgaaaaagaagtaattacagaacaaatgaacacttgagaattaaaaatatgattgacaaacaatagaagggatgataatagctgaagtctgaaacgttgaatataaagttgaaaac

SEQ ID NO: 254 - DNA, 481 bp, Homo sapiens
  misc_feature 318: n = A,T,C or G
ggtatatgttgatatgtgatattacttttatttaaattcactggtttccatttgtgtttatgtatgtgtgtattttatattaaaatatttgattaagtaggatcttaaaatactattggatatcttctatgttccggggactattctagacattggaaatacatcagtgaaataaagtacttaaaacccctgccttattggaacttacattctagatggaggaagtttattataaacataattaataagtgtaccatatagtatgttagaaggacaatggaggaaaatagagcaggtaaaagtgattgggaaacctangcatcattgagaaggtgacatttgggcaaaatgtcacttgaagagtgagaaggagtgagccacgtatttatatctaggggaagagcatttggggcagagagaaaaccagtacaaagactctgaagcagaagcatcagacctagtatgttcaaggatcttaaga

SEQ ID NO: 255 - DNA, 565 bp, Homo sapiens
ggagacgatgaattgaaaaatgtttataggatagttgagtggcaaccgactcctgaggacagtttcagagtaaggttcgaaaaacaagattcaaacccaaaataaatagttgttttttgtttgtttttgtttgtttgttttgacagtctcactgtatctcccacgctggagtgcagtggcatgatctcagctcactgcaacctccaactcctgggttcaggcgattctcgtgcctcagcctcctaattaactgggtctacaggtgcgtgccgccacacccggctaatttttgtatttttggtagagatggggttctgccacgttagctaggctggtcttgaactcctggcctcaactgatctgaccgtctcggcctctaaaagtgctgggattacagtcatgagccactgcgcccggccttcaaaataaaataattttgacatgtcattttcatgacagaagtttcagtatgctacgtatccttaagaatattgggtggcagaaatgaaataaatgtactaatgaaatgtatccaggatttcatgtatcttcaataatttatttg

SEQ ID NO: 256 - DNA, 567 bp, Homo sapiens
  misc_feature 522: n = A,T,C or G
agggactaatggtaggtacacagaatatgatctttgttcataaattatctaacactttattttagaatccataatttgtgttcacttaaaaagaggttgatttgaaattttctatgatttattaaaaaaggtaatttcaaagtaaaataatataatacagactatagaaagaaaatttagactatgagaactgtcattaagaatcataaagtaggccaggcacagtggctcatgcctgtaatcccagcactttgggaggctgaggcgggtggatcacctgaggtcaggagtttgagaccagcctggtcaacatggtgaaaccctgtctgtactaaaaatacaaaaatgaactgggcatggtggtgcacacctgtaatcctggctacttgggaggctaaggaaggagaatcgcttgaacccgggaggcggaggttgtagtgagccgagatcactccactgcactccagcctggacaatagagtgagactctgtctcaaaaaatatatagataaagtatactangaacagctattaaaaaataaacaataacaccaaactctatggctt

SEQ ID NO: 257 - DNA, 540 bp, Homo sapiens
  misc_feature 271: n = A,T,C or G
tcattttagtaggtacaataagttaatttatatttttctcaggaatcacatgagatactcaaaagttcaattttaccttttgatttgtgaactttataaatttgtaaaggtttcttactagcagtaatattgatataacaatttggaagctatcttgtattgcagatttgagaaggtatactgatactgggagccaggatcctttcatattgtgagagtacagaaacacaattatggggctgggtgcagtggctcatgcctgtaatcctancactttgggaggccgaggcaggtggatctcctgaggtcaagagttcaagaccaacgtggccaacatggtgaaaccccatctctactaaaaatacaaaaaaaattagctgggcatggtggcgggtgcctgtaattccagctactggggaggctgaggcaggagaatcacttgaacccatgaggcggagcttgcagtgagccgagatcgcaccactgcactccagcctgggtgacagagcaagactgtgtctcaaaaaaaaaaaaaaaaaa

SEQ ID NO: 258 - DNA, 490 bp, Homo sapiens
  misc_feature 365, 382, 398: n = A,T,C or G
acagaagggaccatattggagggcaagctcaaggcagtgcctttactagaaaggtttttaaaagggaacccttgttcacatttgtcaggacactgcttatctctctagttgaacctgcataacttattttaagatggtaagatacaaagactcttaattttctatctaccaggactcttgacataaattcaaagctcacttataacagctctagcgtcccaagtgcctttgactacactccaatttaacttatcgttcagtttttatgtaactgtcttccttatattgtgcttaattttcttattaatttaacattttaagaagaacactctgccgggcgcggtagctcacacctgtaatcccancactttgggaggctgangcgggtggatcacgangtcaggagatcgagaccatcctggctaacacggtgaaaccccgtctctactaaaaatacaaaaaattagccgggcgtgggggcggcgcctgt

SEQ ID NO: 259 - DNA, 501 bp, Homo sapiens
agggacccctcattgccagtgggaatataaaatggtgcaggcactgtagaaattagtttgatagctcttcaaaaatttaaagatagaattacatggtgtagtaattccacttctaggtacacatccaagagaactattaataaaaatacatcacccagagttagccaaactgcaaagtttgaaggtgcagtcctgaagacacctcacttctaaaaccaactgcaagttaaggtagtttccaaagccacccataggatcaaaaatttgctaaactaacaaaacttactgaaagcttttatattcatagttacaatttctcaggggtaaggatacaaattaaaatcagtcaaagaaagagagtcaaaagatactgaagaagtatgacaactgaacatgtataatccagacttttatttgctacaaaggacattcctgggacaatcagtgtagcctgaataatgtctgtacataatagtgccaaatcaataaggatattatatc

SEQ ID NO: 260 - DNA, 360 bp, Homo sapiens
gaggttgcagtaagccaagactatgctgctgcactaaagcctaggcgacagatccagacactgtctaaaaaaaagacatgtttagacaaaaaaaaaaaaaaaaccggcccttggggtaacaccggcctttatttttcattccagaaccttgaggtacaggtttgtcccctaggaccattaaattttcccttttcccttacagttggggggggtttataccttttttgttggtttaagggccctttttgatgtccacccaacattaaatttgcttacccggcccgggggggggggctaacccctgtattcccaccttttggggaggccagggcgggcaaatcccctggggtcaggattttc

SEQ ID NO: 261 - DNA, 564 bp, Homo sapiens
  misc_feature 468: n = A,T,C or G
gggaacaagagttatccagatttggagtatgggaagtaaggaaggtcaggaaaggctttctgcagaaggtagcaactgtaccacgtaaaatcagtttgaggccaggcgaggtggctcaagcctgtaatcccaacactttgggaggccaaggtgggcggatcacaaggtcaggagattgagaccatcctggctaacacggtgaaaccccatctctactaaaaatacaaaaagccgggcatggtggcgggcacctgtagtcccagctactcgggaggctgaggcaggagaatggcgtgaacccgggaagcggaacttgcagtgagccgagatcgcgccactgcactccagcctgggcaacagagcgagactctgtctaaataaataaataaataaataaataaatttgttaccttttcccctgaccctactcttgtctatcttgatgagcagcaatacctggtaacttangagttattttttaccctaccctctccttcattctccatagtctctcacctcctcttgtaaatctacctgtggtatgtttgcagaattctttccctc

SEQ ID NO: 262 - DNA, 607 bp, Homo sapiens
ttcttggttaacctcagtgttttcacattttaaattatttcctaagtttcaagtgaaactaaatatcatttgaaagacttttaaaggcagtctgcccaccccactccaactcaccccaatttccactaacaactacttcaaatgtaattgtcagaaagagcaccccactccactgcaccccaaatcagcctccgatagatattgcatctgaccctggggggcccttcccgctttcctcttgctatgctcactacactttatttccctcaatgaaaactccttccccaccctcctaatgtgtgacttcacattctatacatagaatttcttttttttccaaagtgaatatagttttatatattttttaactacataaaaataaaacacactcaatacaaaaagaaatggataaaacgcaaatgtgaaaacaaactcaccaatcaccaaccactcagaactttaggtcagtttaataggtgtcctcttctgacatttcagtgtccagtctgccctccttatccatggggtctgcatccacagatttatccaaccatggatagaatatgtgttttaaaaagcaaaaaaaaaaaaaaaaaaaaaaaaaaaa

SEQ ID NO: 263 - DNA, 475 bp, Homo sapiens
tcacaacacacaggtgaagtgagggtgttactataagtggtgggtgtattttgtgcatcctaagcctttctgtttttcagttcagtttttttaaagttcaactactctttttcactgaaaataaaatcacacatgagcataggcagtatgctcaaattattttctggtatattaatcacattggaacaaatttaatctcaaagcacatgttatagcagaattgactgtcctttcagaccattcccattaccaataagtacatatggacattaatttttaataaaggtgtctgggcgtggtggctcacacctgtaatcccagccagtactttgggaggccgagacgggctgatcacctgaggtcaggtgtttgagatcagcctggccaacatggcaaaaccccgtgtctactaaaaatacaaaaattagctgggtgtggtgatgggcacctgtagtcccagctattcgggaggctg

SEQ ID NO: 264 - DNA, 523 bp, Homo sapiens
  misc_feature 380, 482: n = A,T,C or G
tgtttcctttttttccaatttaagatatttccatctctatttcaaatgcttgcttctaaaaaaaagtttagtgaaataagaggataaattttatgtttttattgatttgaatgacattttcccttggatgaattatgaaatgtctggttaactttagcattagtgaagcttgaatagattttaatattaagcaagtgtttagttgcttgacatgatcagtttacactattgcagagccttaattaaagttttattaaactgtgtaaaccgtgatccagtttggatttgaaagtagatagacatctgtttcaaatattattactacggttagaaattaatagcctttggccggatgcagtggctcacgcctgtaatcccancacgctgggaggcggaggcgggcagatcgtgaggacaggagatcgagagcgtcctggctaacacggtgaaaccccgtctctactaaaagtataaaaaattanccgggtgtgatggtggtcgcctgtagtcccagctactcggg

SEQ ID NO: 265 - DNA, 578 bp, Homo sapiens
agaagggacaggttattgtcaaagccattttgttgtcatgtttcccattaggaaaaaaatgtgttatcattaaaaaggaaggcttgtaatagataggccaacagaagcagtttccagattaatttatatagctatcattagttgtaataggagctatctatggaaatcctgcatttacgtatgaggactggctgaagggaatcaagaaatttgaaaacccataatatgaaaattgtaaattctcaaaaggataaacacaaaagtgtgaattttttatatgttttttaaaatatattcatattataccataaaggagtgaggaagaagaagtcttcttgttagtagctttctattggtatttaacatattctaaacattttcactaaagttgattgaaaaattcttatgataaatgtttttgaacacttttatgtcaatttaggaatctgggcactttttgggctaccaacttacatgacaccatctctacattcaaggatactaagtaaagagttccataagtaatttactgataaatatgatatttaaggtatataacttgaatcacatttaaaata

SEQ ID NO: 266 - DNA, 528 bp, Homo sapiens
gcagttctgtagtcatattgatacccacttttaattatatgaaaattaaggggtggatcatgcagacatttctagaaaaggtgtgacaacttccgggtcatcgggtcattgtcatggaaagtggtggtaacttctgggtgttgccatggcaatggcaaactgacatggcaccctggtcagtgtgtcttatgggaaagtgtttttgccccatccctgttttagttaatcatcaattaggtctggtgtccaagcctcacctccagaatccagtactgcctcctacctcattagaattgttttcactgtgtgtcaacatgatcattcctctgttttaacaagggaataaacttaatgaacttcaacttcaggggattttttttttaaatgcaatttgagggccgggcgcggtggctcacgcctgtaatcccagcactttgggaagccgaggcgggcggatcacgaagtcaggagatcgagaccatcctggctaacatggagaaaccccgtctctactaaaaataaaaaaaa

SEQ ID NO: 267 - DNA, 475 bp, Homo sapiens
  misc_feature 56, 413: n = A,T,C or G
gaaataaaaaatgaagcaatttggccaggcacggtggctcacacctgtaatcctancacttctgggaggccaaggcgggtggatcacttgaggtcaggagtttgagagcagcctggccaacatggtgaaaccccatctctactaaaaatacaaaaattagccagaaatcgctttaacccaggaggcagaggttgcagtgagctgagatcatgccactgcactccagccagggcaacagagtgagactacattaaataaaatatatctttaaaaaatgaagcaatttggccaggtgtaggaagtatcttatgtaggaagtatggagtaataaaaaatgaaacaatttggctgggtgcagtggctcatgcctgtaatcccagcacgttgggagcctgaggatcgcttgagctcangagttcaagaccagcctggcaacatgatgaaaccccctctctaccaaaaaaaccaaaaactt

SEQ ID NO: 268 - DNA, 468 bp, Homo sapiens
gggggactacaggtgcgctactgcttctggctaatttttgtatttttggtaaagacggggttttgccatgctggccaggctggtctcgaactcctgacatcacgtgatcctcctgccttggcctcccaaaagctgacatccactccccaagtgcatttttggtatgaaccactgtgccggtccacccagttgtgattaaactgtgcaacaccaaccgtgacaagccaatacccactggtgtctgtactgaccacgcgctgactacagatgcctgtccagcaaagtaaacttgagggcttcccgctttacacactcgcctggtgagaactgtacagattggcacatgctcagtgtgaggttcaagatacctaactgaatatccctcatctcaacagaccagttattttatcttggataaaatggcactcgggaagccatatacggacgaaagtgtccttggtaatgggc

SEQ ID NO: 269 - DNA, 537 bp, Homo sapiens
  misc_feature 67: n = A,T,C or G
agcattgctacagatgcttacagtgaaaagaagaaaccttaaggtttgtaagctgtctccatctcanaaagttagggggcaggattgactgtgaagaggcatgacggaaccttttgggagatggcaattttttttttttcttttgaaacaaagtctcactctgtcacccaggctggagtgcaggggcgaaatttcgattctcctacttgggaggctgaaacaggaaatttgcttgaacccgggaggcaaaatttgcagtgagccaaaatcacgtcattgcactccaccctgggcaacgagagtaaaactctgtcttaaaaaaaaaggctaacagctgggtgtgggggcttatgtctgtaatcctaccactttgggaggctgcggtgggaggataccttgaagccaggagttcaaaaccagcctggacaacatggaaaggccctgtctttacaaaaataaaaataaaaaattagctgggcatggtaccatgtgcctgtagtcctaccttcttgggaggctgaggtggaaggattgctg

SEQ ID NO: 270 - DNA, 614 bp, Homo sapiens
  misc_feature 248: n = A,T,C or G
actgtagtatatgttgggtagggtcttttggcttttcttctaggtgtgttcagtgctaaagacagtattgtttccttggacataaatagtcttaatgcggtggctttctcaaatgccagttttagtagcagcaacctcctgagtagccagggtggtataggcaatgattgtaagaagcttatcttgttcccaagtgctctatagttgtgtaagcaaatctgtaatggactgtgcactccactctctangccagtaagtaggtgacacttgcaggtaagacccatctgcagtggtagcagtttacaataattgaggaggtgagaattcttcctaactcattctatgaagccagtatcatgctgataccaaaaacatataaggacacaagaaaaagagaaaactacagataaacatccctgattaacatacatgcaaaaatcctatgcagtgtactagcaagccagatcaaacagcacatcaaaaagatagtacagcatcatcaagtgggttttataccacatatacaaggatggtttaccatatgtgaaccaattaatgggcttcatcacataaacataattaaggaaaaaaacatgatcacctcaatagatgca

SEQ ID NO: 271 - DNA, 546 bp, Homo sapiens
  misc_feature 393, 471: n = A,T,C or G
caatagtgggtgaagcaaaggccgtggagaggcagacgaaacggactccagcgcaagccacgctgcaaatctctatgccaggcagtttgtgcctctgagctctgccatgccattcccttttcctggatgatctcttcaataaacctttactgagccactcctggggcagggattattctgcaactgtgctgcaaaggtaaacaacctgggctctcttctccagaactcatttccaacacttgaagagacaagtaagaaacttcaagtcagtgtggagagtgctgcaagggccagtactggacatgatgggagacactggaaagtcccaaacctagtttaaggtgttaggggacttcctggaatcggggacatctaagctgagccctaaagtangagacagtcagatgggagagagtaaagaagaagacatttcaggccaaatgcctgaataccataccctggagtggtcangttggttctctggtgggaacacgaagattctcctgatcttctcctccctactctcaacactctcaacattcgtag

SEQ ID NO: 272 - DNA, 671 bp, Homo sapiens
aacaaaattgcagaggaataacaaaagcaaagacttaatagttattctgcgtgggacatgttgacagcatgccaaaagaattaggatctcatcagtctggaggcctaaagactgtagagtaggaaaaaacagataaatggagtctataaagaaagtcaagacaacaaactgattttggagggaatattatgttcctgccaaaatcccttgactcaaaaaagaaaagacagatgatccctcctgttacatgacagttgggtcataatctctgttttattcagagataagaatgaaagtatttttaagtcaatccatagaagatctaggacaccatctatccatcaagagaaaggttgaccctttactgaaaaagaagtcttgaaacagtaatcatggactatttctttagaattaaaaaaagtgagaataatgaaatagtcctgataaatatttattttatttatgatttaagcagtgcgtctaagcatttgaattattgacttgacctcttacattttcaaacgcaataaaagctctcttagccgacttttatttaactgacttacctgatgaactgacactttcccttaatacagctgacacccataactcacctattctcaaataaatacatacatttctgctcccaccattttatgtttaccaacttt

SEQ ID NO: 273 - DNA, 546 bp, Homo sapiens
caacactgtccatgtaatagtgggcagagaggtagttaagaatttcaaataccagagtgagttccaagatttatactccaccccagcccacctttctttatatcaattacagaaccaaatagcctctctctctctctttctctctctctctctctctctctcacacacacacacactccaaaccccccagtaagttaagaacattcacagatgtacatcacatgcaaatctatgtagtagaaactgagaccagctctgtaccttatttggttttgtccctgctggattcagctgcccctaccctagcactggcataattttgccatcaatggaaagagtatattcatatcaatcccctattagtcaacagaataattagctgtcatcaaaaaataactcagtcagctgggcatggtggctcatgcctgtaatcccagcactttgggaggctgaagagggtggattgcttgaggtcaagagttcaagatcagcctggccaacatggtgaaaccctgtctctactaaaaatacaaaaattagctgggc

SEQ ID NO: 274 - DNA, 656 bp, Homo sapiens
  misc_feature 560: n = A,T,C or G
gatattgtgtcctgtggaaggcctcatagaagaagcacatgataatttgtcaaatattggtgatattaatttgatcaggtggttaaaaatgttatctgcaaaggttttctcctgtgaaattactgagtaatgcatggaaagatattttgaaactctgtaaatattgtattccatgtcacatttgtgccttcagtcattttaacattcattgataacgccatttcttctatggttattgtttggcattctaatgcaaggaacaactcttatttatacctgcatggcttcaggggtccttgtttcattcaatgagttttaactctttactggtactattttgatattctaaagatctttggccaatttgagtaccttcaagctgacatccatgtactttttattgctctcaacattctttggccactaatcagtcttttttccaagagtccttttttcccttagtcgggaatgtcttttaaagagccaaatttggattctgaatatgcttattgtaactgatatgccattgttattaagccccttcagtggacaaagctaangaatattcaaatatgttctccctctctctccttatctttagtatatttatttggtaaatataaaacaaatgtagtttggaaattgataaatcatgc

SEQ ID NO: 275 - DNA, 527 bp, Homo sapiens
gtctacaattttcctttcctataatctacaaacttattttggcccataagtattctatttgcttagctaaattaaacgataccaggacttgagtagaaaacgtcatgtatatttaaatgtaaagcaattatttgcttatcacaattttaaacaaatattttaaaggatttatagctgtttcctatggaataagcctgtattaatctgggttctccagaaaaacaaaaccaatagaagataaagaaatgtatcataaaaaaagcagaagagctgctgctgtaagttccagtccaagcctgggtccaaaggtagaagaccagtgttccagcttgaaaacagacagagagactgggttcagtggcttatactgtaatccctgcactttgggaggctgaggcaggaagatcgcttgaggtcaggagttcaagaccagacgaggcaatatagtgtagatgttgtctctacaaaaaaatttaaaagtcagccaggtgtggtggtacatgacatgcctgtggtcccagctcctt

SEQ ID NO: 276 - DNA, 378 bp, Homo sapiens
ggatggtgatgatgatgatcacctggcctctgcaacagtttcctaactcaactcttggcctctagtcttgtcaccccaccccacccccactccaatctcttttcatactcctgccagagtgatttttttttttttaaaccagggtctcactttgttgcccaggcagaatggccctggcttgatctgggttcattgaaacctccacctccccagttaatttgatcctcccacctcacccccccaagtagttggaaccacacgtgtcccccccatgtcgggttaattttgggtaaaaatggggcttccccatgtggcccaggctggccttaaactgggctcaagtaatccccctgccttggcctccccaagggctaggat

SEQ ID NO: 277 - DNA, 611 bp, Homo sapiens
ttggccgagcggcctacggctgcgagagtcgacagagggtagaatggaaataccagtgtttttctatactattagctattggacctggtcttttggtttttgtttaaatctttttttcagatgagatgggtaatgtgcagacgtcgtaagaaggttcgagtgtggcacatctcacgcttgtgtgtgaacacacaatcatcatgctcatgaactacaaaaggattggacattgtctttttgattattaatattgttaaataattgtattatttgtatagcatgttagcatctacaaggcacttttgatttaatttgactcaattaaataggccacagtgaccttgtctattttcttttagatccaaggtctaaggaaggatgaatcaattgaatttgggtgtccattttatactaaagttttcaatgttttggatctttaatcagttattgattctttcttgatatgaccagttgtaagaatggaagggagatagatttttatttttaatatttgtgtctcaatatacgcacttatgtgtcacttccttgtattgcctttttcattaaaattttatcttacttgtttataaaagaagttagaaagtacagtg

SEQ ID NO: 278 - DNA, 567 bp, Homo sapiens
gatttagtttcataactcatgatttttcaaaaacttctggtttgaagacaccgattgccgaaagtccattgtgctgcataattacacttggtccacgtgacagcactaacatgttctgaaatgtttttagaagtagtctcagcaaagatgaaggattcctccctgtttgaaaagaaaatattctttgttttttctttgatctaagctctaagactagcagctagcatctgaaacttttttgacgagagtgacaaaccaactctaatattaaaggcaattgatgattatgggcactgaagggaaggtaaccccaggctggtgccccggaatagggatgggtcacaatgttgaggacatttcgcctgttgcagaacccacctgcaacacagtgtggcccttgccatgtgacttgtgtgtgtgcctgtgtgtctgtgtgtgcgtgttttaattttgacttcataagtactctagttatgagcttatttaacattgggttttactaataggggtatgtgttgagaaaatttcaaagttttagaatatggttcacccacatgttgcttccct

SEQ ID NO: 279 - DNA, 446 bp, Homo sapiens
agaagggtatacttaaattgtatttaatagtggttaggccgggcacggtggcttacgcctgtgatcccagcactttgagaggctgaggtgggtggatcacgaggtcaggagttcgagaccagcctgaccaacgtggtgaaaccccgtctctactaaaaatacaaaaattagctgggcatggtagtgcgcacctataatcccagctactcaggaggctgaggcgggagaatcgcttgaacctgggaggcggaggttgcagtgagctgagatcgcgccattgcattccagcctgggtggcagagcgagactctgtctcaaaaaaaaaaaaataggggttagtccccttgaaatgatggttctaagggaaaaagtggctttttgaaaggccagtttattcctatcacattttgacagctttatcaaaatgttttttatataccataaaa

SEQ ID NO: 280 - DNA, 598 bp, Homo sapiens
agagggtaacaataaatcagctgaatttattacaaatttctaaaggccaagtgtggaatagcacaccaatttaacataatgacaagtccagaaatcagagcacacacttcctcagaagtttccctttgggtactcacaagaaagcataggggttagaccaaggcccaaaggagctgttctcaatggcacagttttatgagacgtgtcagctgctgatgcaagaaatacccaaacaccacccacttcctaaaactcttctctcacacattaaaaagactttcaaccacaaaagaaagggcatcgaaacttttgatatctaaggtcacttgtggagaagtaaaagcagaaattctgccttcccaaggttagaaaaatctctctttatctcaaggaaccaagtgaagaacagggttattgttgttgttagtgatcattatattttttggaagaagggtaaaagtgaaagccacctgtaactgggagatgagtgggaaaatttctcatgctcaagatctcccacagacatgagattgtattggccataatgagaaaatggatgaaggagttgaaaaggctcaatcttgaacccagcaagctc

SEQ ID NO: 281 - DNA, 541 bp, Homo sapiens
  misc_feature 411: n = A,T,C or G
gcatgagcaacacggtgaaaccctgtctctactaaatacaaaaattagctggccctggtggtgcgtgcctgtaagtcccagctactcaggaggctgaggcaggagaatcacttgaacccgggaggtggaggttgcagtgagccgagatcacgccactgcactccagcccgggcgacagtgtgagactctgtctggagtgtagtggcgccatcttggcaagattccatctcaaaaaaacaaaaatctcaaaagcaacaaatagaacttattccaggtatacaaaagtggttcagaagaagaatccattaatacacctagcatatcaacagaatagaacttgtcatattaaaccacataatcggctgggcgtggtggctcatgcctataatcccagcactatgggaagccgangcaggcagaccacttgaggctaggagtttgagaccagcctggctaacatgatgaaactgcctctctactaaaaatacaagttaggtgggcatggtggcacgtgcctgtaatcccagctactcgggagggt

SEQ ID NO: 282 - DNA, 448 bp, Homo sapiens
  misc_feature 342: n = A,T,C or G
ggtatttttagtagagaggggtttcaccaagctggtcaagctggtctcaagagcctgaccttgagtgatccgcctgcatcggtctcccaaagcggtgggattacaggcgtaaaccactgcgcctggctcaagtatttattaatgaataaatatatatgaaaatcttaagaatttcatgtttattttcagatgaaaaccaaaacactaaatacatggaaaagtggtaatatttcccatctctcttcaggataagtacaacagaaaacataatgctcagccaggcatggtggcacatgcctgtaatcccatcactttgggaggccgaggcaggcggatcacganggcaagagttcaagactaacctgggcaacgtggtgaaaccctgtctctactaaaaatacaaaaattagccgggcgtggtggtgcgtacctgcaatcccagctactc

SEQ ID NO: 283 - DNA, 550 bp, Homo sapiens
  misc_feature 508: n = A,T,C or G
ggttttctgtaaccagtttctgctttgcctgatctagtagctgtccacatattcaggtaatctattcctaagtagctttcaagcagtcagaaacaggattgcattgcttgtacttttttgggcgggtgtaggttatggagaaaggaaattggataaagatcacatgagaagaagattatgatggtgccggtgtcactgagagatctactgacccgatgttgccttcttttgctgccttgtgtgtgctgtacgtatcctgcgttaggacccttgctttggcagcgttagctacaaagtagtggaatgtcccatgcagttatttctgtatttctgttaggtctgttcctctcaatctcctcagactgacttccatatcctcgtttctcaagagtgtggtgcccccagaccagcagtatacacatcaccaagagctgattagaaatacagaatctagagctccagcccagacctgctgaacccgggatctgcatttaaacaaggtccccangggattcatttgcattggagtttggattcactctggagtttg

SEQ ID NO: 284 - DNA, 592 bp, Homo sapiens
  misc_feature 275: n = A,T,C or G
gcttcatcatcagtaccaccatcatcatcatcacccagcaagccaattcttcaactaaaatcagttcacagtaagcagggagacatataaacagtcatcatatgtgtggtcaataaaaagagaagtctgtaccaggtaaagaggcagcacagaaaatagagtgatggacttgtctggggattgcagagagagcttcaaagacgtcaggtctgagctggattttgcaaggctctctcttagatgtaagcattcccttgaccttgtcttttttttanggagtagggagtggggagtaagaccactgctttttttttccttcttaaattttttaagttctctcatttcttccttgtccatacccttgctgataatgaggcttgacatctatcttcctgcctgctccattcaaacagatgagtaccgtccatggtttctaattctgtaccttcaattttcactgcttgtctgtttaattgcacatatacgtttaggaatttgtcaaggagtacagaatccatcttctgatttacatgcattgagagtcttgtgtctcaaaaatgaaaatcttaataaggcttttccatctttatcc

SEQ ID NO: 285 - DNA, 586 bp, Homo sapiens
  misc_feature 280: n = A,T,C or G
gataattatctgagaacacagactggtaaataaatactcaaaatgcatattactaagcactacaatagaaatgtgaatccaagggctgtaggggaaagacctctacctaaagtgaagcaggggagtctcacaggaaaggtgtctctggatctgaatccctaaggataagtaggaattcaccaacagagaaaagaaataaggactcttgggacaaaatgactggtacacgcaaagacacagcagcatgaagggaacgacagagaactcttaagtgacttancgtgggtgagcggtcaagtgaggatgtgaaaaggatagaggatgccagatagaaaagaaaaagcctggtcctgatgcttttaagtgtttttctctaaactttaaagagactggacttgatgcactgaggtcctaactggggaaaggacaagattggatgtgtatagtaaaaagatcactttggccgggtgcagtggctcacgcctgtaatccaagcgcgctgaggctggcagatcatgaggtcaggagtttgagaccagcctggacaacatagtgaaacccatctctactaaaaatacaaaatatt

SEQ ID NO: 286 - DNA, 632 bp, Homo sapiens
acagcagcagcattagattgtcataggagtgcaaaccctattgtgaactgcacaagagaaggatcttctggttgtgcactccttatgagaattaaatgcccgccccctccatgctcccatggaaaaactgtcttccactaaacctgtccctgttgccaaaaaggttggggaccacggctctaaaatattagatgcagacaactcagatgcaataaatatacatttggaaaatccttcatcataataaggttttctaaagagtttggttaggttgaaagtccagttctgctcctggaccatatgaaaaggtcagacatctctgatagcctgaaatctcaaacatctccattacttatactcaatcccactgcccctaatcattctttgcctcattcatcaaactagtatttattgagtacatattatgagccaaacactgttctaggttcagtagatacagcacagacaaaggcacacagctgtttgctgtcatgggtctttaaattatatcactcagctatgctcagttatgctgagttggatatttgcaacatatttatgtaccgaattttcaatcacataacctgtacaatgggtcatgtctaggcttggtttaatcatatacagataat

SEQ ID NO: 287 - DNA, 533 bp, Homo sapiens
gcagatttgtgtgtgtgtgttctctctgcttttattaacgattcagtattcatttgaacatctgcatatcagagagcatgagctgactttgttcataacaataattccatcttaaaatgcttcttaaagattcatatttaagttattgagttattgtttaatcatgctttgaggtccctgtcctctgtccaaaatacatagaaataaaaaatatagcaagttaaaaaatacattattttctctctctctctctctcacatacacacacccccacccacccacaaacacgcacacacacgagcataaaaagaccgatgcttcagcttgttggactagaacactagttgtgtagtttcgtgtattataaatagatggaactcaaattctaggttacacagagagaaggttggtatgaatttccacaatgtgccattgaagcacctgatgtaaagtacttcatttgaaggcaaaggaaatagatacagtaaataatcttgaacttcatcgtagccttctatttttacgtatatctt

SEQ ID NO: 288 - DNA, 569 bp, Homo sapiens
agcaaaggccgtggagaggcagacgaaacggactccagcgcaagccacgctgcaaatctctatgccaggcagttggtgcctctgagctctgccatgccattcccttttcctggatgatctcttcaataaacctttactgagccactcctggggcagggattattctgcaactgtgctgcaaaggtaaacaacctgggctctcttctccagaactcatttccaacacttgaagagacaagtaagaaacttcaagtcagtgtggagagtgctgcaagggccagtactggacatgatgggagacactggaaagtcccaaacctagtttaaggtgttaggggacttcctggaatcggggacatctaagctgagccctaaagtaggagacggtcagatgggagagagtaaagaagaagacatttcgggccaaatgcctgaataccataccctggagtggtcaggttggttctctggtgggaacacgaagattctcctgatcttctcctccctactctcaacactctcaacattcgtagtttttacctccactaaatactctttcctatattata

SEQ ID NO: 289 - DNA, 565 bp, Homo sapiens
  misc_feature 297: n = A,T,C or G
gggaaggctaaatccctgccctctgtatcctctagcaatcctccctgaaatgattttactctttttaatatgatggatgtctttgattcaaaggaatatttgagaaaaatgaagcctctgtcagataaaagtacttatacacaggagtttctgattggggaagtaggtatgtatgtatgtatttatttatttattgagacggagtcttgctcttgttgcccaggctggagtacaatggcatgatctcggctcactgcaacctctgcctcccaggttcaagtgattctcctgccttancctccgaagtagctgggattacaggcacccaccttcatgcctgactgattttttgtatttttagtagagacagggttttaccatgttggccaggctggtctcgaactcctgaccttgggtgatccacctccctcgggctcccaaagtgctgggattacaggcatgagccaccacacccggctggaagtttgttttttggacaagccatagtttttgtcctccaggatatatcactgtctactttttaaagctctgtttatttgaatac

SEQ ID NO: 290 - DNA, 479 bp, Homo sapiens
  misc_feature 75: n = A,T,C or G
gggacctttggcaacgcttcctacttgcataacatttttccatggctgatccttctcctgccctgtgttattcanaagcatcgtatgttgcagtggcaaaaaacacagatgacaagaagttacaacaagatgagaagggaaggaagccctctgtaacctgcaggtgtccaaatattacaatttccctttctactgaaatgagtggtctgaacaagatataacaaaatgggtcccagaacagtaaatttggtgcatgacataaaaagcctgccaagacgacagatactctagcgggaaactggcatttttataactggggaattgtcacgcaagcaaaacagagtaagagaagaaaaaaagggggaccgaatagcaaattccatgaaggtttcttaacttatcagaaactttaggccgggcatggtgattcatgcctataatcccagcgctttcggaggccgaggtgagaggatcacctg

SEQ ID NO: 291 - DNA, 378 bp, Homo sapiens
gtctcactttgtcacccacgctggagtgcagtggtgtcatctccattcaccacaacctccgcctcccaggttcatgcaattctcctgcctcagcctcctgagtagctggaattacaggtacccgctaccatgcccagctaatttttgtatttttagtagaacggggtttcaccgtgaagaccaagctggtctcgaactcctgacctcaggtgatctgcccacctcggcgctgccaaagtgctagaattacaggtggcatgagccaccatgcctggtctaactgctctttaatatatttaagcatgattatcctgatcagtgggattgacaggcattcttaggcttacacaaatctgcctgggggtgtcaagatcatct

SEQ ID NO: 292 - DNA, 635 bp, Homo sapiens
  misc_feature 548: n = A,T,C or G
gatgttattatcacttttgcttctacaaagcttttttgtcagcatcaaaaaaaaattagaaaaaggtacattaagatggggagatgttaagtgacttgttggttattcagctagtggcaaagcaatggttagcacccaatcctgactttctgagacactcataatccacagaaatcctaaaccttttgtctactaccaggcatataaacagaaccttactgttatctcataaatatgtactatcatttacagtttcattattaattttactcttctcaagtaccaaaacaccacctccccctgacaaatgaacttatgctttttatgttctacctgtgagtactaggatcatcaatcatatctacagcttcccctcagttgatttatggatagtttgtattttcactgtatctgtctcacacctttttgaaaagggaacattgtatggctacttttatgtgattaactcctccatcaatttatgtgtcaatgattgccttcctgtaatggattcaatttctctgtctccattgtttctttctcactanagaagttctttaaaattctatgaaaatgaaactgtgctaaattaaaaatctactcatgataacaggagacactcaaaattatgggtt

SEQ ID NO: 293 - DNA, 556 bp, Homo sapiens
atgattccagtgtgccaagtgcacattgcttttgtacacctctgcttttgtatattgtttcttctgtttgaaatgccttttcccaccaggcgcattggctcacacttataatcccagcactttgggaggccgaggtgggtggattacctgaggtaaggagtttgagaccaccctggccagcatggcgaaaccccatctctactaaaaatacaaaaattagccgggcatggtgacacacgcctgtaatcccagctacttgggaggctgaggcaggagaatcgcttgagcccaggagacggaggttgcagtgagccgagatcatgccactgcactccagcctggccgacagagcaagactctgtctcaaagtaaaaaaaaaagaatttctggattttccaggcatggtggctcatgcctgtaatctcagcactttgggaggccgaagtgggtggatcacgatgtcaggagattgagaccagcctggctaacgtggtgaaaacccgtctctactaaaaatatgaaaaattagcgtatgtttcacagcatctgtaatccc

SEQ ID NO: 294 - DNA, 596 bp, Homo sapiens
acagaaggctcagcccatgactgtatcctaagtctaaaatgtcatgtgaaatatcatcagctcaaaagtcccaaatctcatcatctaaatcatctccatctggtatgcatgaaactctaggtatgatccattttggggcaaaatctctccatttttaaactagaaaacaaattaattggccaggtgcagtggttcacgcctgtagtcccagcactttgggaggtcaaagcaggaggatcacttgagcccaggaatttgagaccagtctggacaacatagtgagaccctgcctctacaaaaaaattaaaaattagccagatgggctgggtgcggtggctcatgcctgtaatcccaacactttgggaggccgaggctggtggatcatggtgaaaccatgtctctacaaaaagcacaaaagttagctgggcatggtggcacatccctgtaatcttagctactcaggagactgaggcaggagaatcgcttgaacctgggaggcagaggtggcagtcagctgagatcacacccctgcattccagcctgggtgacagagtgagactccatccctaaaaaaaaaaaaaaaaaaaaaaaaaaaa

SEQ ID NO: 295 - DNA, 523 bp, Homo sapiens
  misc_feature 221: n = A,T,C or G
gggtttgccttggaaatagaagaccggtactaccccatcccaggcagaatgactggatccagaaggggttcaactaggaaatgcagaaagaggctttgttcctggaagatgctgttctggtctagttttaagtgctgtccacgtaagtgtgaaatgaaaatcaatcttggggcccccaaatcactaagctaaaggcaaaagtcaagctgggaactgcttanggcaaacctgattttattcaaagtcaccgctctgcttgcttatgagataaatctgtatcagattgcctcttttagagaggctcattagaaacgcaaaagaatgcaacctttcgtctctacctatgacctggaagccccctcccaccttccagttgtcccaccttcgcctggcattgtccacctttccagatggaaccagtgtacatcttatacatattgattgatggctcgtgtgtccctaaaatgtataaaaccaagctgtgcccctaccaccttgggcacaggtggtcaggactcgcctg

SEQ ID NO: 296 - DNA, 581 bp, Homo sapiens
gggggattaaaaaaagagtcacttttaactggaattgtcaaagaaggcttcgaaaatatgtggcaaatgaaacttctttaaggaggatgagattaattgtgtagtgatatggtaggggatagaaaagtagggaactccaggcagtattgtttcatttatccattcagtcatcaccaggtataatgccatagtggcaggaagcgtagggtgatttgggagaatatttatgaattgcctacccagaataggagacacagggtagcacttctacaaaggtgacatcaatatggtgtctttaatgctcaagtaacagtttgcctatgatggttaaaaggaataagaacagatatgttggggagaggaaatagcacatgcaaaagcacagatacatacaggtttatggagagttcaggggactagtagtgaattggtatggatgaagcatagtatgaatgtgaccatgagcgaaggggtaaacctgggggagctcaagcggttttagcaaatagtgaatccctttacctggtaaatatgaaggttgcagagaaaattaagatatctatctatctatttatctatct

SEQ ID NO: 297 - DNA, 519 bp, Homo sapiens
gggatccttattcaaaatgcctaggacaccagaagtgtttcagattttgaatttattcagattttggaatatttgcatttcccagttgagcattcctaatcaaaattcaaaatgctgcaatggcatttcctttgagggtcatgttggtgctcaaaaagttttggattctagaacattttaaattttggatcatcagattagggatgctccgcctgtatatcattccaacttgcagttactggtacatattgtgggctccttatatgcccccttttttcttcttttttggggtcagaacatttaagctgaaagggaataagagtagtctaacccagccgggcgtggtggctcacacctgtaatcccagcactttgggaagccaaggcaggcagatcacctgaggtcaggagttcaagaatagcctggccaacatggtgaaaccccgtctctactaaaaatacaaaaaattagctggacatggtggtgggcacctgtaatctcagctactcaaggaggctg

SEQ ID NO: 298 - DNA, 578 bp, Homo sapiens
aagctttatggtacattcattcctttggagtctaagctattggttccaacctccccaggaagtctccagtgttatggaaaagggtttgtgaacaggaatgtacttggacagaaaatgttcttccctttaaaaatgtatcttaaggccaggtgaggtggctcacgcctgtaatcccagcactttgggaggccgaggcaggcgattgcctgaggtcaggagttggcgaccagcctggccaacatggctaaactctgtctctactaaaaatacaaaattagctgggcttggtggcttgtgcctgtatcccagctacttaagaagctgaggcaggagaattgtttgaacctgggaggtggaggttgcagtaagccgagattgtgccactgcactcttgcctgggtgacagagcaagactccgtctcaaaaataaataaataaatacacaaataataagaaaaaaattatcttaagaaaatgatcatggaatgcatgcatttagctatgtggatgttcatcacagtgttgtttataataaaaaattaaaacaagccaggcacggtggctcatgcctgtaattc

SEQ ID NO: 299 - DNA, 523 bp, Homo sapiens
  misc_feature 80: n = A,T,C or G
ggctcctcagacctaggtgatgtgactctcctgtctgttacctcctcttagggggtattgtgatatattgctgggcccanaaccgaggtgatgtggtcttttctcttgcctgggccctgcatacatggtgtacagtaacatatatctgggttgaacacataggtgatgtgactcttctgcataggtcttgccaacaggggtattatgacatacctttctattcgttgcctaagctatgtgactctccactcttatctgggcccttccaaaagaggggattgtgacatatcagtgaccctaccaccaaggtgatgtgactgttctcttttgcctgggtttgcatattttgggtattgtgacatatccctgggcccaacacttaggggataaaaggcttattcctctaccttatgcacagagaaacttgtgacgtttttctgcattcatcaccaaggagatgtgactctcctacctgcatcctgaccacagagaggattgtaacatattgctagatccagcaccc

SEQ ID NO: 300 - DNA, 535 bp, Homo sapiens
acagaaggggaattgcaatccccttctggctgtctacagagttcatactcttcacaccacagctgggctgctaagggccaaatcctagctctgccttttaccggctttgcaaccttgggcaagttccttcagctctctagactcagtttcctaatctataaaatgggtttataatattactacagagtagtgataaagaatacatgggttagtgtacgcaaaatgctggagacaattaacatatgtgaatcctgtgacctgatacgcacccagcaaacccagcaccctccagctccaccatgacaacacagaagatgctcctctagcccagcaggagaagtcagctgcattgaggcttgaagggtgaataagaattatctgggtaggaaaaggagaacagcctcactggcagagtttttataaaggcaccaaagtctgaaaggcatgaagagtttagagggacccgttaacagtttagaacaactggatgacaattgcgtagaaggaaatggatactgcggataccacggagctc

SEQ ID NO: 301 - DNA, 548 bp, Homo sapiens
  misc_feature 337: n = A,T,C or G
agaaggaccttcttgtctcagctaatgaacaaaaaaacaaaaaagaaaataaatcaaaaccaagtcaataggtcagtaatttaaagaaaaagattaaaaacactggaaaatgctgcagctaggcaaggtagttaagatgcagaggaatacaaacatttgtgaaggtcacagccctgagacacaggctcacgaaaagttagagatttagccccaagattatagaatacacccccttctccatgacttaacaatacaccaacaggatttcagtataataaaatggatcacaactgaaaaagctgtaagacacatgctctctctgtggaggagcacttangcaagctcaaaataaagacgggtggctaaaaaatgacactgggggaacttgaagactccggcacctatagctacagcaacactgaacacagcataactcataaccagattaacataaattcttatactaaaagcttatttatttagttcctatgacttgataaaacatatccagcttttggctgggtgcagtggctcacacctgtaatcgc

SEQ ID NO: 302 - DNA, 519 bp, Homo sapiens
aaagaaattttctaatttgctaatatatactatatacaaacatatccatataaaagcaaggaagaaaacatataaatactaaaaattctgtaactggctgcatagttatagaagtatttacaatgtcctttctctactacctattctatatggactttgctgtcacctacctattctatattgacttcagtcaacgtggagtaacacacggcttcattcctaaaggccctgctggtttggggtggttttctattacctctgtcaacagaacatgagaatactaaaaaagtacctccccacacacatatctctagcactccacatacagtcttctctggcccaattgtgtaatagctagtctcttgacagtcgggataaatcacccagtatggtaattgcttctttttgcctgttgttttactagcatgagaaacactaagttgccaggtgactggcaataaacaaaccatggcttaattcagaatgagagaaacaggaccatataacggtcaacaattc

SEQ ID NO: 303 - DNA, 661 bp, Homo sapiens
ggagcgcctgtccaagtttacatgaagtctgagtgttctgggcaggcagccgtcctcattttggctcaagtaaactttttagaattgtattttatgcctcaattcctttctttaggtcgacagctactatgaacattcttatacaaatctttttgtagacatatgttttcattcctcttgagtaaatatttttgagtggaattgctgggtgataaaaggtacttttaataaaagttaattttatgaaactgcaagacttttctcccaaagtgtatcattttacactcccatcagcaacgtgtgaatactctggttgctccacatttttgctgacattatgtgttgttggtctttttaattttacacattctgatgggtatgtggtggcttctgccttgcattttaattgactgttgcatacctttcttctgcacttgatactaagcttccatgaaaatcacgacaatcaattgtaccccctctagtgcctgtcactgttctttcagtgtcgtaggtgtgaaataaatgtgaaatgatgacaataacttaatgttttgacatctagttttgggaatgtgatgtgaaaaaaattgaagccatgaaaatatatatagataaatttgaccacaaatgtcattaaatagttatactttattggaat

SEQ ID NO: 304 - DNA, 539 bp, Homo sapiens
gacctgcacttccccgcccacctctgctccagttcagccacatgggcctctttaccccttgaacacaccaagctctttcccaccctgggaccgttgtacacatttttactctgctgggaatattctccctacactgggcatggctgggtcccactcaccctttaactcccagactaactacttcctcttcagggagtctttttctggccagctttttctagtcttcgcctagccccactacacagacacacacacacacacacacacacacacacacacacacttattttctctcagagcttggtgttcctcaccttgtaacattgccataattcataatcacttattcatttggtgtgtatattattgatgcccctgaagatcatgatagttttttatttcattcctggcgcttggcacatggtatgtgcttaataatattcggtgaatgaatgaatgaaatggcattgggcatgtttcccctcctccctaaataatgttctacgttgaaacacactgtgatgtgctcatatcattag

SEQ ID NO: 305 - DNA, 561 bp, Homo sapiens
ggattataaaataatgagactacttctataaggcattcatgaaaattacttattttattttacataagaaaatttaaaaggatttataatgtttgtatattaccttaaatatacagatttacatgaatttactttctttttcttctcttgacaggaaaatatacatgcaagagtaagtactttttaaaataatataaatcaaatataaaaatcacgagaaaatgcagctgactgttcctgtccaaatcagaaattctgatttttctaatcatgagtattgcttttaataatccaggattacaaaggcatttaccccattactggtgcatattttacttattaaattattatcacatatactttaccaaaccttttagaagaatcccaacatataatttactaagtttgctgatgccagaaagtctttgggaactgctcatcatacatatgtttgggaatcttaatgtgtccaaaaacacttctttctatgaaacatattagtctttaaaaaatctcagattaatatcataatgcatttgaagtttctatagattaatgcat

SEQ ID NO: 306 - DNA, 549 bp, Homo sapiens
gatagctgaatttaaagaaacatggtaaaagggaaacattgatgagtcccatgttgtttggcactgttgcttttaaaatacaactagctttttggttttactttcagtatgttttatttatttatgtatttttagaaacaggttcttcttctgttaaccaggctggaatgtggtggtgtaatcagagctcatagcagcctaaatcctgggctcaaccaatcctcctgcttcagcctcccaagtagctggggctacaggcacatgccgtcatgcccagctaattttttgttttttgtagagacaaggtctccctattttgcccagtttggtcttaaactcctgggctcaagtgattctcctgcctctgcctcccaaagtgctgggattacagacatgagatgctgcggccggctattcaccatgttttaaaataagaagaaaaatggctggttctggagctgatcttttctttctccatcctaaatggactggaggttattttgaaattttactgtgaatttcctttttaacttggagctgaaaaaagta

SEQ ID NO: 307 - DNA, 412 bp, Homo sapiens
gcactgcagcgtcaaactcattggctcaagcgatcctcctgcctcagcctcccaagtaactggaattacaggtgtgtaccacgatgctcagctatttttttaagcagtcattccttgatgtccccctcaatcttgtatttgtatagtttctctactaatttttttcatccactataatacattcacaatctaaaatacatacggccatgcatggtggctcatgcctgtaatcccaccactgtggcaggccgatgacggtggatcacttgaggtcaggagttcgagaccaccctggccaacatggtaaaaccccgtctctactaaaaatacaaaaattatctgggtgtggtggcgcatgcctgtaatcctatctactggggaggctgagacccaagaattgcttgaacctggg

SEQ ID NO: 308 - DNA, 535 bp, Homo sapiens
gctgctttcttctttccacactggtgggctcaatgccccaccacacagtatggtctttgctcattatcttccttacacacactcttgtttatggctcccctctctctatctattcaatcccacccaaccttcaaagcctggctcatgggatacagggtttctaatggaaaaagtttggatgcagatgggtccagattccaaatctcaacttaccagctgtgtggcttgggcctttgccatatgtgaaaatggggatagtcatccccacattccaagcctgctgaaggggaatgagtgtcaagggtctgccacaccatccacctcttccagaagtctcccctatccttgcagtccactcagtctgtccttcctctgagagcatcactcttgttagtgtcgctcatttggcaatgagtcttctctgtcctgtaacatctcttgtgatgacccgccctcaggtattgtgatgtaactccttcaatatcattaaactttccatggtttccatgcttctctccccactcaaactgtctgc

SEQ ID NO: 309 - DNA, 419 bp, Homo sapiens
gatggtgaaaccctgtctctactaaaatacaaaaaattagctgggcatggtggcgggcgcctgtagtcccagctactcgggaggctgagacaggagaatggcatgaacccgggaagcggaggttgcagtgagccgaggtcttgccactgcactccagcgtgggtgacagagcgagactccgtcttaaaaaaaaaaaaaaaaaaaacctggggattaggccaccttttcttgtccaggggaaaccccaaaaaattttacccccttccttcaggcccccaaatgggctggccttgcccatgaagggggggaaaaggacactgcaggccgggtgggggggctcacccctgtaatcccacccttttgggaggccgagggggacggatcacctgaggtcaggattttgaaaccaccctggccaa

SEQ ID NO: 310 - DNA, 523 bp, Homo sapiens
  misc_feature 391: n = A,T,C or G
gatatttttaatagagatggggtttcaccatgttggccaggctggtgttgaactcctgacctcaggtgatccacccacctcggcctacaaccattcattttagcacaagatgcaaaagcctgtctgtgggaatagatgctttctcttccccatggagttctgtgaactcattagtactttctaggatttttgtttgcttgcctgctttttcaaggaatttgctattctaccttgttctgatatttggtcaaatcagaaaacgttagaaaaccaaattgattctttcttacactaaataatcttaaaatccaaatgaaggctgggcatggtggcttatgcttgtgatcccaacactttgggaggccgaggtgggaggatcctctgagcccanaagttcgaggctgtagtgagctatgatcatgccactgtactccagcctggatgacagagtgagacactgtctctacaaaaaataaaaaaattagccagtcatggtggcatgtgcctatagtcccagctactc

SEQ ID NO: 311 - DNA, 564 bp, Homo sapiens
  misc_feature 442: n = A,T,C or G
gctgttcctacttcaggcttgactttgaatatgttagtgaaaccctctaaatctcagtctcctcaactatacaatgggaataataagaacacttatttcacagggctattataaagaataaataagataatgtatgtgaagttcttgcacagtacctggtaactaaaacatgtaatgaatgttaggcattactaaagtcattataatgaatatcatcatcctcatcttttcttattactgttaaaaatgtatcaattccttttattatgcagtatgatttttccattttgtcctcacaagagtaagtcctaatattcggggagttggtttgaggtctttgaaattactacatctctgccacagttctttagtttagaaataaaaacactcattaaaaaaaaatttctcggccgggcgcggtggctcacgactgtaatcccancactttgggaggccgaggcgggtggatcatgaagtcaggagatcgagaccctcctggctaaccccgtctcttctaaaaatacaaaaaattagccgggcatggtggcgagcacctgtagtccc

SEQ ID NO: 312 - DNA, 440 bp, Homo sapiens
  misc_feature 193: n = A,T,C or G
ggggcatgagccactgtgccccacctatcatttcacttttaataagtctctgacatatttgggatttcagcacagagagtgagatgggaactcatctttttttcccaaatgactatccagttatgctaccagcacaatttatcctttttatcaaaagcttgaattttcaagggtctctggggtctacttctanaatctttattctgttccactgcagtttaaccacacaatggaatgctttgcaatcattaaaagtcacttaaaaaactaatggacgtggccggacgcggtggctcacgcctgtaatcccagcactttgggaggccgaggcgggtggatcatgaggtcaggagatcgagaccatcctggctaacaaggtgaaaccccgtctccactaaaaatacaaaaaaaattaaccgggcgcggtggcgggcgcctgt

SEQ ID NO: 313 - DNA, 441 bp, Homo sapiens
gcattattcattcctcctagattcaaaactaaaggattgcccactataagttaaaaaaaaaaaaaaaaaaagtctcctgaaacctgagtaatgacatgggaaaactttttacccttaaccaaacattaaaggcttttttacccttaaaatacagggttaaatttttcaatgcattttcacattttttacctaattttttttcacaactaaaagtctttcctgaactgcagtttccttacaaaaaaaacccttataatcaagttccatcaaaaggattgatgtgaaagttaatgattaaaggggcttaaagtatcttaaccattttgaatgaaaggtccacccgggttttactgttattaatataaggcggttcatccattacaaatttggcagggataacaaacagcagttttaaccttatttactggccaggccaaaaag

SEQ ID NO: 314 - DNA, 572 bp, Homo sapiens
agggattaataaaactgacaaactgcaagcaagatttaaaaaaaaaacaggagaagacactgataatcaacatcaagaatgaaaaagagggcatcactatagatgctgcagacatcaactaaaattaaaaacaggatattactgacaacttcatgccaattattttgagcatttagacaaaactcacaaattcctagacaaatgtaatttccatagttaattcaagaataagtacaaaacctgaataagccaataaccatgaaagaaattgaatcattagttaaaattgttatcataaagaaaacatcagactttgatggctttgttaaaagttctacaaaataaccaggaaataaataattctaatcttacacaaactatcccagaatgtataaaaaaaagaaggaaaaccatgttatgcatcaaatacatccttgatactaaaactggagagccacaaacagaaaatgtaggtttttcaaaatgaaaatttacaatagcaacaaaatatataagccatcaaagaaagaaaatgaacaaaagggatgtaaaactgttataaaactttaaag

SEQ ID NO: 315 - DNA, 494 bp, Homo sapiens
  misc_feature 445: n = A,T,C or G
cagaagggcatatgggcaactgccttaaatctaaatgaactgaacactcaaataaaaaaacaaagatcgtcatgctggattaaataaaaaccatgtcatatcattccaataggaagcacgtcaaaaccataaggatacagaaagtgaaagtaaaagttcgtatttatataggtatttgcttaataattattcaataaactgaacatatgtattttatgcatttttaattatttgtgtttttttaattgacaaatgaaaattgtatttatggtgtacaacatgatgttttgatgtgtatatacattttggaatgtctacatcagactaattaacacatatataatctcacttttgtgatgaaaacatttaaaaatctactctcttagtaattttctggtatacaatacatttttacatgttttatatcacaatgaaaactttttanagtacacatttcaatgtttctaatacttaaaagtaattggtaacataat

SEQ ID NO: 316 - DNA, 579 bp, Homo sapiens
  misc_feature 415: n = A,T,C or G
gggccgggcgcggtggcgcgtgcctgtagtcccgagtagctgggactacaggcacacactaccacacccggtgagtttttttgttttcttttgtttctttcttgtagagacaagagtcttgctatgttgctcaggctggtctcaaacttctggcctcaagctatcctatcctctcacctcagcctcccaagtgctaggattacagaggtgagccactgtactcagccgcaatgtaattactaactgctctcctttcactcacaaaaactgtgccaacttgaccgtgaattatatggtcacccaagtttgaaggaattctcatgggcacaacagagaaaaagtttatgtttcacacaggagcctaagctagaggaagtagaaaacatcatagttgtagctcagccattctccctanagaactgcattttgtttgtgttatttgcatttgttgtgtatctttaacatacatgcatgttgttagtctgcattacaattctctacagtgtagaagaaaaatttaattggtattaatactatatagtacaatacccacaaaatactcactgatgtatttaataa

SEQ ID NO: 317 - DNA, 572 bp, Homo sapiens
tgctaatctgaaataattttatttcagctaccgtgttcttaatataatttgtctccacattagacgtacaaagagaatataatttaatagtttgaagattatcctttcctgttgtattatgtgtttttcatctaactggctgatatacagcaagttttctctccaattatataattacctaaatagcatgacatctctgattttgcctcttgacccacaaagcctaaaatatttaagattttatcctttttggaaaaggtttgtcaactcctatttcagctgaaggatctaaagcccagaaaagttagatgatgttcccaaggtattggttagatccattttgtgtgtgtgtgtcttttggggtcagactattctgatattgtatggattctggagtatgtctggtttgaatcctacatccacccgttactaccctggtgatctagagcaaatgacttccctttgcctcagtttccttgtttataatataggattggtgttagcattaaatgagataatatatgtgaaataattacagtgtgctttgcacatggttagtactccagttaact

SEQ ID NO: 318 - DNA, 595 bp, Homo sapiens
cagaaggtcagtgactgtagaagctaccacgataactacctgctggctttgacagccatgaattgtgtcccaagtgtgacatttgccatgcttctcagtatatatggcctttcacagtaattcctggcatgatgtatatgtatacagttggccctctttattcgtgggttctgcattaagggagtcaatcaattgtagattgaaaacattcaagaaaaaaatacaacaataaaaatgatacaaataaaatcataactttatatagcatttacattgtataagtgattgtaagtaatctagagatgatttaaagtatgtaggaggatgtgcacaggttatatgcaaatactgcattattttttataacggacttgagcatccatggattttggtatctgctgtgggatgggatcctggagtcaaccctccaagggtactgaagaatgactacatactgtatatacatatatattcatcatcttatatatctatatgtgtatgtgtatatttagtatttatctttatatgtttttacatgtgtttttgtagtctatatctatattagtacataacccacccacacacaccatacaca

SEQ ID NO: 319 - DNA, 624 bp, Homo sapiens
gggttgatggatgcagcaaaccaccatggcatgtgtatacctgtgtaagaaacctacacgttctgcacatgtatcccagaacttaaagtacaattaaaaaataaataaacaaaggtaatattatatagatgctattcacttgtctaaatgtttttaaaagttaaatttatatttagtttgaagcattcttttcatacctgaaaacatatatttttttaaatggaaatctttttttcacttccctaacaattaaaatatttggcaaaatcaatatcaaactttctaaagtgtgtatggaaatgtaaaggacagctaatgtcttcagatggatttatattacaaaatataagacctattatagaactgtagcatttaagatagtgtagtattggtgagaggttagatagcagtaaatcaatggaacagaatagagattccagaagcagacccatgcttactggtcatcttatttatgacaaagatgacactgtggtgcagtgggaaaataattttttcccccagcaagaactgcaaggtcaattggatagccttatggaaaaaaaaatgaatcttgactctttcatcacaacatacatgaaaatcaattctagatgaactgcaaat

SEQ ID NO: 320 - DNA, 575 bp, Homo sapiens
ggtatctctctaagaaccccgatgatacagcccatatttgtcttgaggaaagcctttacatatgttttcaattcaagttatttgtagctaatatgtaatctgtaacatattaacaatttataaagatatcctaaatcaatttgtttgtcttgagcttctggactctcaggaggcaaaccgtgtttccatttccagtagagattactattgcttatgtacatccagttttccaacagtcatgtcctcataggaagattccacttcctttgtagttaggtggggtttcattactacttctagcaaattacatgtgccagaagtcatttatgtgtcacttgctgccaagacatttagaaacaaacgtgcctcttctatgtttccaactgccctgcctttgatagctcggaaggcatgtgtaaagaatgcagcacaccacaagatagatgaagggtgcctgggtctctgaatcactgcatggagtcaagactctactgacatgtctttctgtgtgccagaaataaactcttatatttttatttttttctgtttcaaggtgctaagcttgccacactctt

SEQ ID NO: 321 - DNA, 532 bp, Homo sapiens
ggtagtgtataacaccaggggagccctttccaaacacagcagcgtgctccacactctgtgtttccccacactctgtgtttccatctctcggggtgattctgagtgatgatagctacacgttaacactgtatcagcaccttttacacttctgagtgcttttgagccaagaaatttagcaaaccaaggacataatccaacagcaagaaggaaaaaaatgaaaattcaacaaagaaaacacatacacacactaagaatatattaaccaagacacaatctaccctattctctctttttgttggaccatgctatcaacactcagctgagaagttttaaactgataaaatgttatttactaaaaacacggaacaaacataacacacaatggtgagaagataaaaaaatcagaaataagataaagattcctgtgataattacttctattcaaattgtattgaacataccagtaagcctagtagataataaaaagggtaaaaactgaaggaagaaagaaaatggtcattatttatagctc

SEQ ID NO: 322 - DNA, 530 bp, Homo sapiens
gatgatatttcgccacgttggaccaggctggtctcgaactcctggcctcaggtgatctgctcaccttggcctctcaaaatgctgggattacaggcgtgagccgccacacccggccaggattgttattactacttttaacccatttcccatttgccccgagaatactcttgtctctaatcccaatgtaacatcatatacatttctgctacattaggattagagacaaattctgttcagaaataactccaagaacagtttttatattttatttgcacattgaaactcaaccagatttgcttcagcctcaacaagtgtgtttatgtaaagttaaatgaactctggcagtgagctgcacgttttttaaaattaggaaatgagttagctaatattgaacttgaggttttagtcaatgcaatgagacaaaaagattgaataggaagaaatgagtcattatttagagattacttcattatgtatgtagaaaattctaggccagtcattgtggctcacgcctgtaaccccagcacttt

SEQ ID NO: 323 - DNA, 632 bp, Homo sapiens
tgggtaggattaaatctgtattgagaattaacaatgtattattgaatttgtaacatgaatcaatatacaatattaatagatgtaataataataccacaaaagaaggggtttaaaatagtgttgtatgggagtaatatatttctatgtctctctgggatcaagctgagatcaatatgtactgggatcaagtacatattggaagctgattctgtaaattaagatatacatggtaagccctaaagtaacccctaaaaacaacaacaacaacaacaacaaacctcaaaaaacatagtgagataaataatttaaattcttcattaggaaatatttacttaatgcagaagaaagcagtaagggaggaatagaagaacagaaaaatacatgagacacagtaaaccaaaagtaaaaatgacagctataaatccaactatatcaaacataacattaaatgtgaatggattaagaaatctgatcaaaatgcagagattgtcagatggattaaaataaaacaataagatccaactatacactgtctataggacacacatgttagacgtgaatgtttatagaagaattattcacaacagccaagttgtagaaacaacccgaacactcattgactgactaaatgg

SEQ ID NO: 324 - DNA, 497 bp, Homo sapiens
aagtttgagaacaatttacttctctggttcctgtttacacttctagtctgggggactaaacttggaaatttacctcaaaattctaaccatcacgctcttgatagtcactggttaaaaaaacaaacaaataaacaaacaaaagcaaactcgtctttcccaattttcccttagagtttcttaatcaacatagttgctcttagattcaggttcagacatctccaaatgaacatgtgaaaatgcaactcttgatttttctaaacagttatacatactacagccatggtgatcatcttaaaacagtagcagaccaatggttctcaaaagttactagatattagaattatgtggagagtttttaaaaagtaactgatgcccatattcttaaccaagtgtattagtttgttttcacactgctataaagacatacttgagacagggtaatttataaataaaaggggtttaattaactcacagttcctcatggctggggaggcctc

SEQ ID NO: 325 - DNA, 576 bp, Homo sapiens
agaggggtttcccattaggaaaaaatgtgttatcattaaaaaggaaggcttgtaatagataggccaacagaagcagtttccagattaatttatatagctatcattagttgtaataggagctatctatggaaatcctgcatttacgtatgaggactggctgaagggaatcaagaaatttgaaaacccataatatgaaaattggaaattctcaaaaggataaacacaaaagtgtgaattttttatatgttttttaaaatatattcatattataccataaaggagtgaggaagaagaagtcttcttgttagtagctttctattggtatttaacatattctaaacattttcactaaagttgattgaaaaattcttatgataaatgtttttgaacacttttatgtcaatttaggaatctgggcactttttgggctaccaacttacatgacaccatctctacattcaaggatactaagtaaagagttccataagtaatttactgataaatatgatatttaaggtatataacttgaatcacatttaaaatataggttattttaaatgtgaaagaagaaaaaag

SEQ ID NO: 326 - DNA, 547 bp, Homo sapiens
ggtgccaggaagggacagctaagtctgctctggaggtcagggatgtgtacctaaggaggcaacatctaaactggtcttgaggaacagccgaagatggcgaacgggacagttcctgaaaagggaatgtgagatttggcaatcaggatagctgtagcctttactacggaaaagtcagtggtggagacagcagacagattcagcgggctgaagagtaagcagaaggtgacgatgggtaggcaggagatagaaaccattattttttgaagtttgatactaaagagaaggaaaggctaatacttgaagggggaagttttctaaatgggtgggacttgagcatgtttactggcagaaggagatggaggtgagaggccgaacgtaagataggcaatagtgggtgaagcaaaggccgtggagaggcagacgaaacggactccagcgcaagccacgctgcaaatctctatgccaggcagtttgtgcctctgagctctgccatgccattcccttttcctggatgatctcttcataaacctttactgagccactcctg

SEQ ID NO: 327 - DNA, 316 bp, Homo sapiens
tcaaatacagtctatgggacctgagagccacagaggtttttagctgagttttggcgtgatcatattcttgtttttattgcatcttgattactctattgttgaatgattgcatagcgaagtcactacagggaagtatttcatgtcgaaattcacagaagtaaggcaggctaaatatgatgaagacctaagtcaagggagtgatggcagtggagcaaatatctggtttatatgcaagaggcttatagaatggttgtgtgtgtgtgtgtgtgtgtgtgtgtgtgtgtgtgtgtgtgtgtgaagtatgtatgtatgttgg

SEQ ID NO: 328 - DNA, 576 bp, Homo sapiens
  misc_feature 480: n = A,T,C or G
gattccttgtcacctagtgataaccgttgcatgtatctctctaagaaccccgatgatacagcccatatttgtcttgaggaaagcctttacatatgttttcaattcaagttatttgtagctaatatgtaatctgtaacatattaacaatttataaagatatcctaaatcaatttgtttgtcttgagtttctggactctcaggaggcaaaccgtgtttccatttccagtagagattactattgcttatgtacatccagttttccaacagtcatgtcctcataagaagattccacttcctttgtacttaggtggggtttcattactacttctagcaaattacatgtaccagaagtcatttatgtgtcacttgctgccaagacatttagaaacaaacgtgcctcttctatgtttccaactgccctgcctttgatagctcggaaggcatgtgtaaagaaggcagcacaccacaagatagaagaanggtgcctgggtctctgaatcactgcatggagtcaagactctactgacatgtctttctgtgtgccagaaataaactcttatatttttatttttttct

SEQ ID NO: 329 - DNA, 545 bp, Homo sapiens
  misc_feature 102, 117: n = A,T,C or G
gaaataatcaccacatgaaagctaactaacatatccattacctccgcatagttacatttgtgtgcatgtgtgcatggggttgagtagggagatttaatttangacttgtcctcttancaaattacaagcatgtaatacaacattgttaactatcatcaccatgcagtgagtgcattagagctccagtaattattcgtcttgcataactggaactttctaccatttgaccagcatcagcccattttcaccttttcgacaatcccattccacccaatctctaccctcaaacagtctccattaatttggcatgtatatttctaggtttttttctatatacatatgtacagctatattatatatgactttacaaaaatgagattacttttgtatcagtaggattatttgatttgcaagcaatagaaataaactctggctgacttaaggctgaaaaggaatttattggaaggatatgaggtaggtaaagagctgaagaactgagcgggaaaacatgaagagccacgctggtaaagcaacttccatgacac

SEQ ID NO: 330 - DNA, 610 bp, Homo sapiens
gggagtctcgctcagtcaccaggctggagtgcagtggcgcgatctcggctcactgcaaccttcacctcccgggttcaagtgattctcctgcctcagcctcccgagtagctgggactacaggcgcgtgccactatgcccaactaattgttgtatttttagtagagacggggtttcaccatgttggccaggatggtctcgatttcttgacctcgtgatccgcccacttcggcctcccaaagtgctgggattataggcgtgagccactgtgccagaacaatgtcaggattttttggcttatctttactgacctggtctaatccccacagatgaatatttattgatttatttttttctctttttggaggaaggaagccctgttgtcagcatcctaaaagctagaaatgagaaaagctgggaatctcaattttcagtgtgtgctttgttttcaatattgtaccctttcctcaattggtctcagtggtctccagtccaaagactctctgttttatcctctacggaaaatgaacattttgtcctttatacagaaatggacatgtggggccgtcttcaaccactcctaaaacactaaaacagacattcaataaatcct

SEQ ID NO: 331 - DNA, 486 bp, Homo sapiens
ggggtgagagtttcctcctgattatcagtagagaagcatgaatgaagcacacagcttgaatgaagcttgtatcttatccaggtttccaggtttacatatctaggatcaaagatgggcacaaaatgaaacaatcttgttttcatttaaatactattttgatattttcagtttgcatatctgttttgttttagtacatctaaaaacacatggtttggtcttgtttctatgtggggttttaaaagaaaaaaggcccaacgaaaaaaaaagtttacttacagcccctacccccaacacccccaacacacacacacacacacacacacacacacacacacacacacacactcactcttacatcaccaccataaaataataatcatggcgcagagaacaaaggcagtttctggttttggaatatcactgacgcatctggataaaagcccgaatttaatagcaaccgcgcatattatgttatattatataaat

SEQ ID NO: 332 - DNA, 506 bp, Homo sapiens
ttgctggtagctctgtttttgcctttcaggagcacttctgaagagaatgaggctttttttgagaggaaggaggattaatcatgaggacatgctttggaaggccagagtttgctgtcccgtaaagagattgtggtagagattttattttcagttggattaagtctagaatcacattgatagtgatttacattgcctgaagtagggaatttgctctttaggttggtcaattaattaggtccgtattctagatttgctagaaaaaggagcaactcacttgaagagctttgtggtggttgctcttatttcatatcctcacatgtttcatgattaaggatgaaaattgggcctggtgttgtagctcacacctgtattcccagcactttgggaggcaggggtgggcaggtcgcttgagcccaggagttcaagaccagcttgggcaacatggcaaaaccttgtttctacccaaaaaaacaaaacaaaacaaaattaactgggcttggtggtgc

SEQ ID NO: 333 - DNA, 540 bp, Homo sapiens
  misc_feature 297, 483: n = A,T,C or G
cagtaagggcactacaataaaattaagtatactttaggctgggcatggtggtttacacctgtaatcccaacactttgggaggccgaggcgggtggatctcttgaggtcaggagtttgagaccagcctgggcaacatggtgaaaccccatctctactaaacatacaaaaaaattagccagacatggtggtgcacgcctgtaatcccagctactcaagaggctgaggcacgagaatcgcttgaatgtgggaggcggaggctgcagtgagccaagatcacgccactgcactccagcctangccacagagcaagactctgtctcaaaataataataattattattacactttaaacagagacagggagaaaatgtgttccagttcagtggccgggggcagtaaagaaaaaaatagctgtagtagctgagtccaggtcgcttaccattttgacatctttccagccctagtatatggttttgctattangagaattgcttaatctggctgggtgcggtgactcacgcctgtaatcccagcactttg

SEQ ID NO: 334 - DNA, 513 bp, Homo sapiens
  misc_feature 339, 441: n = A,T,C or G
aatccttgtataataagtgagctcatgcagctcaaacccatcttgttcaagggtcaactgtacttgaatggatttttttccctgtcataattaaccacccacacacatcttactagaccaaaaaagaaaacttgtcaagcaaataatctcccatttcttgggtcatttggagagataacacaggccaggttatatgtcctgaaagatgagaatgtgtgaagtccccagagagtctgatacgaggccttcttccagggagtagtggtctggccgctgcaccagcctgccccctgccatgccctgactcacctgcacatcatgggtgctgctgatgcccangcttcatggctgagcatggcacccttaacacccctcacctgttacccaacggagatttgtgggtcggaggcatttcaattggagaaggatggaatggctganggcaggaaaacttaacaagcatgaagtctgcaccctggctgcacatgaaaatcccctatgggcattgaaagt

SEQ ID NO: 335 - DNA, 555 bp, Homo sapiens
gggagcaaggctgtaggttggagcccctcagtagaatcatagattttgagctgcaagatgatgcaggaggccaaccaagcttcttgttgctggtgaggaatgtgaggttgaagcttgtctgtgctgatgcagtgcgtgattgagtggatctctggctcccgtccatgtgtcctgacacccagtctggtactttcattatgccacaggcctcaattgaaaaatcacagtagggaatttaggccaaggaaagccatcaagttgcaattatttcctaaattttctttggaaaatttcatttcaaataccaaaaccatcctataaaaagaaaacttaccttcttaggtcaaatctctaatatttgactagattcaaaaagtttatttctggccaggcacagtagcttactcctgaaatcccagcactttgggagaccaaggtgggaggatcacttgaggccaggaattcaagaccagcccgggcgacatagcaagaccccatttctacaaaaaatttaaaaattgtcatggtggtgcacgcctgtggtcccagctactc

SEQ ID NO: 336 - DNA, 601 bp, Homo sapiens
gggttccctaactcgaggcctggcaccagtttatctcgtgcactctggaaaccaggacttttttttgacatttcactctcccttacctcttcttttcaatctcaccagattctgtttattttttcttctaaatgcctttcaaatttctccacccagctccctttccatttctctccctatcgtctctcatttggagagagcgagagctttttgtctcccaacatccagcacccattccttaaatccgtttctccatcagtctttaagacgttagaagggagagaaacaaagaaaaaagaaaaacttcctttcaatcacatctttctaggttttcactttaagggtaaagactaaaatgtttggcaagattcagcaagccttgtgtgatacagaagatacgctccctcagagaggatccgagtccgttttgtgtattcacatatcccaagtgcctagagcagtgcctaccacagagcttgtgctcagcatatatttgctatggaatctgactcctgctcttgctgtggctcattggcctttcatttccttgaatgtgattttattttacctgggatgctcttcttctccattcttggctgac

SEQ ID NO: 337 - DNA, 534 bp, Homo sapiens
agggaattaaaaaagaaatactgccctactcacagtgctactcactgaatatttccaatttcctacctccaaaacagtggacataggactgtgttatgggatgctgcttcctggctactttgcagttgaggacactgatgtgtctggttctagactgtgacctgtggctgaatgtttgattgccaatacaaaactctgcaaactttcctctttctgacttcataattagcagtgttcaagtaggtgactgctttgtcatccaggatccctgggtgatatagagcataaacaaacaaacaaaaaaaagatcgttgtcattttaagccattgagatattgagggtgtttgttactgcaacataacattataccctgcctgatgctctcaacatcagtgcccagtaagaaaggatgaatgtggagtgaaattgaatcctgtgacaggaaacagtggggaaactaaggatcattaaaaaaggaagagacatcaagttggcaaataatactgaccaatcttctaacacacttatccccg

SEQ ID NO: 338 - DNA, 508 bp, Homo sapiens
ggtcacataccaggaaacttaatcttctctaaaagacattgttgaatggtgtcatatttcaggtggaaattgaaactaggcacctacaaaataacacgcatcatgaaaacgttaatcacaaaaatctgccaaactctggaattaaaaatgaatgcatataaaacaagaattaaaacattttattacattgtcattctttttctatctctgtatttttaaataccgtgagataactaaaactaaaatttcgcttattttttaattgttaactttgaatttaagttggatgataaaataattatacagaataaaaagtcaagtgagtggatattttagtatattcctttttattttacaatgctttttttcaaaactgataaattatcagtgaactgaagaatataaaatattttgtttaaataatttatcctttaagaaaaggcaaaatacattagaataaaaaacaaggtattttggaaagacagagtataagtaataactcatttca

SEQ ID NO: 339 - DNA, 533 bp, Homo sapiens
  misc_feature 271, 321: n = A,T,C or G
ggacatgctaagtttggagcatctatgatgattctgggtaaatgcatctaacagacagttaagaaacaagtctaggccgggtggagtggctcacgtctataatcccaacactttgggaggctgaggcgggtggatcacttgaggtcaggagttcgagagcagcctggccagcatggtgaaaccccaaatctactgaaaatacaaaaaaattagctgggcatggtggcacagctactcgggaggctgaggtgggaggatggcttgaacccangaggcagaggttgcagtgagccaagatcatcccactacactacagcctangtgacagagcaagactctgttctgcccgtccccaaaaacgaaaatgaaataagtctggagcccacaagagcaatctcggctacagacacaaatatattaggacacaggtagatttcaaagccatgaagggagatgaggagatcacacagaagaatcaacagagtgagaaaagagtcaagttttgaagcccaatcaacaccaaatttaagatc

SEQ ID NO: 340 - DNA, 452 bp, Homo sapiens
ggtaaatatatgcagaaaactaatggaatgtaatggttatttactaaggattgtagaggaaactgttcctgcatctgctgtttctcgattgcctttagctcaaaataatctgcatgccaataatatattgtggggtgacatacctgatctccttcactagattgtatgctgctttgcaacaatatatacagaacctcacttttttacattctctctactatttggtattttcagacttaatctttttcccatcaagtaggtataaaatgatatcttgaagattttcattctccttatgattagtgaaatcaagcatctctttgtcaaagcacaaaaccagaaaattagaaaatattactaaaagttacttcatgtaaatatataaaaatacagttacttcaaattgcggtatagattcattgcagctctaataaaaatcctaacagttttta

SEQ ID NO: 341 - DNA, 590 bp, Homo sapiens
  misc_feature 434, 441: n = A,T,C or G
gccctgtcttggactaagtcatgactggtccaatcatgtggccttcagccaatagacaaatcgttgagttgttcaaagagccagagagaacacattgtgtaggcttgacttcaaggtacacctttgccttggagagctaccatatactgttgcattcaccaaagaggagaattttagatgtcatgagtaaactcactgtggaagcttaaaaagaggcttgagcatgagataccagttattaagatgggcaaattgcagtctagttgagctggctggaggaagaagaatgacaatatttttattagttcattctcgcattgctataaagaaatacctgaggctgggtaacttataaagaaaagaggtttaattggctcatggttctgcaggctatacaggaaacatggaagcatcaatttctggggaggtctcangtctcanggagcctttactcacggcagaaggcaaagcaggagcaggcaacttacatggcaggaacagaagcaagacaaggtgggagccacaaggtgctgtacacttttaaactaccagatctcatgagaactcacttactatggtgaggacagtac

SEQ ID NO: 342 - DNA, 217 bp, Homo sapiens
gttacactgtgttagccaggatggtctcgatctcctgacctcgtgatccggctgccttggcctcccaaatgctgggattacaggcgtgagccaccgcgcccggccaaaacacagatcttatagcaacacgcaggaaagaactatgggccgaattttcttaactgtgcttgaagtgggctgtgactactaatcactctttattttatttaagaattcc

SEQ ID NO: 343 - DNA, 503 bp, Homo sapiens
ttgcagccatatggtctctgatgcaacgactcaattctgccactgtattggacaagcagccacaggcatgcataaatgtatgactgtggctgtgtttcaataaaactttatttacaaaaacaagtcgtgggccggattttgctcgagggcagcagtttgccaccgcctgtgctagtcagtgaatgttcttcttgcttgggagaggaaaaggagtggaaaactgtagattcggtttttttaaaaaaatagtttagttcttatctgattatagaagtgatattgcttataatagacatttggaaaaagacacttgtaaacgaaaaaaaagcaaaacattcatcttattccacaacgcatgtcgccgagagtagtttattgggggttgttccttctagtgatcttcaggaatctgtcgtgtctactgaaggtttccttaaccattcctgttattgggcattaagatgatttccaggccgggcacggtggctcaagcctgtaatccc

SEQ ID NO: 344 - DNA, 578 bp, Homo sapiens
tcctgacttcatgatctgcccgcctcggcctcccaaagtgctgggattacaggtgtgagccaccgcacccagccccctctgccttgaaaatactcacagcatcatctcaacagccaatacactgaaacccctctccacactgaagcacagttgtctgtgaagaaaaattagggaagccatagaggaacaatagctcctttgcaaattacagcttcatcagaaggaaagttgaggcaggcatatagtattttattttatacaccacaaacagacaacccctagacttggaattcagaattaacaaaagcattaaatccatcgggctttgagaagggtcaatgttttttcatatgtcttccctgctaccattatttgcataacaaatcgctgcaaaatgcattcatgtcagatgttggaaataaactctttggggtatagctatttttaaacaacccatagttatacgggtgtttttaaaacattcaaagcctgagtttatgtttcaaatcataagtgatcacaggaactctatattgttggtctggtgctgacctacagaacagagtctgaagtccctc

SEQ ID NO: 345 - DNA, 496 bp, Homo sapiens
ggtactattttattgtcaattatgttttctttaaaaaaatttatgacagattacttttgctaattatgtgtgtgggtagattatgttattcatgaattttatttcaggaccttggtaaggggttacacaatatttcttttgaaacgagggtctcgattattgggcttgagtatcctgatctaattaatgcactgggcagagctggcagacgtgtgggacacccagctattctctggaagggaagggggatataagagacacactataaaggtgaatggtaatcggcatctccccttcaaggggaccaggaggatctgagctgactgggtgcctttgtggaagtgtgttttgaactgagattagagagatcagcaatgtatctcttaaagtaatccaggaggagttcattttcaaccgattcagcagtggaacacttgaagaggaggaagtcaaaattcaaaatgggttgggtgcagtggctctctcctgtaatctc

SEQ ID NO: 346 - DNA, 507 bp, Homo sapiens
  misc_feature 361, 386: n = A,T,C or G
gggcatgcaggagacagaagcaggaagggctgcttagtggcagaaagcaaagagtgtgagtggcaggtgaagaagtatgaaggcctctgtagtaagatgaatggtctttgaaggatgctgaacagcaaattgcaatgccgtgaatggagagtcatttgggatgttcatggaaaagagcaggggtctgttgtggctggagctggagatagagaatgagtgtaggagactggtggagaaccacaatcttatacagccctaaaggtaattgtaaggtttttggagtctgaatgaaaaacggttctctcatttaaaggcagtgaagtggcaggttctgactctccctttaagaggctgaccctangagctctgtggagaataaattttangatactgagtttggaaacagggagagtaattggaaggtatcctaacaaatcagaaaggagatggtgtttcaaacaagtggtagcaaggaggtgcaaagaaactattagatttgggatatac

SEQ ID NO: 347 - DNA, 581 bp, Homo sapiens
  misc_feature 259: n = A,T,C or G
ggggattactgaaagccccttccatagagtaactcatttaatcctcgcaacaaccatattattatccccaatgtacagactgggacattgaggcatgaggagattaaaatatcttgcccaaggccacacagctattaatggttattactagattctggctccataaccacacccttgatcactgtgtgacagtagcagaattgagactaacaaaagcaaccctgaaggctcctctcggcttggggtgacatcaccctangagaccacccaactgcgagtgcctacaggcacaagccacatcccactgatcttgttgtccagagcccagttgggaaaaaggaagggacagggaatggagtggtcagaggcacaagccgtgcaattagaaaggtctgttccaccagcctcgccacccgctggtgcagcactttctagctttgagtctcactgagctcaacttggaacaaagcctgtcttctagaaccacgggaacttctgggagatgaggcagctaaagagctgagttaaactgtgaagcttgaccaggcgcagtggctcacgcctgtgatcctagcactttg

SEQ ID NO: 348 - DNA, 629 bp, Homo sapiens
  misc_feature 401: n = A,T,C or G
gctactattgttcttaggatttggaacaaaatgcttctttctttgacaaaataaatgttttctttaaagaactcttgattgatcctggaccattgtagaaactgaagtcctatcaatgcaaaaaaatatgacaacatgagctgcttatcatgaaataagtgttttccaattaactatcctgcttcatcagcaggtaggaataatagaatctatacctatgtcttcatgggaagttctctatggccagttgattagtgagggaaaaattgagcctgatttacagaagtcactgtacaacatcacagcagcagccaaaagtagattgcttaggcattataacctacgtgaatgcaattttaaaagaaattcagcctatgtaattggttgtccacgatgtctangagagatattattgatgtatatgtggcagctaataatttgtctagataattaaggacttggggccaggcctgatggctcacacctgtaatcccagaacttttggaggacaggacaggtggattgtctgatgtcaggagttcgaaaccagcctggctgacatggtgaaactccgtctctactaaaaatacaaaaattagccagatgtggtggtgtgtgcctgcaatcct

SEQ ID NO: 349 - DNA, 534 bp, Homo sapiens
gcctctgcccttctggtggatttttctggtgcaagtgaggtcacagagaaaggaggttttcagcctgacctgcttcccattctccagtcctgcgtgtgctgagaggtctctgtgtggtggcggtagcaggagcagtgcttcctgactcttatttccagcccctggattgcaggcacagctgtgagttttcagagccaacagcggtggcagcctcagaggtggtggcagcttccctggtgggtcagttctgcggcgtcccaggtatcagcccctccagtcctcccaaccatttcctgagcacttagtgacctgtgttcaatccttcctgttggatatacacaagcacatggcaagtgcttggctcatatctcagcatggagtaagcgctccataaattgttattgctataattcccacaagatcctgctctctatgagcccatggtctggttagagaggaaaagcgttcattaaaaaatactctgattggccagaagtggtagcttatgcctgtaatctcaacactttgggaagc

SEQ ID NO: 350 - DNA, 394 bp, Homo sapiens
gagggggggtcaagaagacagaaaccagtgagtctgtgggagaggtgggagaggtgggaggtgagtacaaaacagtctcacttgccgggcacgacggcttgtgcctgtagtcccggcgctttgggaggccttggtgggtggatcatctgaggagtttgagaccagcctggtctaacacggggaacatggtgaagcctcgtctctactaaaaatacaaaaattggccgggcatggtggcaggcgcctgtggtcccagctactcgggaggctggggcaggagaatcgctcgaacatgggagttggaggttgcagtgagccgagatcacgccactgcactccagcctgggccacagagggagactccgtctcatctgcctttttttttttttttaaa

SEQ ID NO: 351 - DNA, 644 bp, Homo sapiens
  misc_feature 399, 502: n = A,T,C or G
acaccactgcactccagcctggggacagagcaataccctgtctctaaaaaaacaagaagattcctacagagcctgaagtcaagcaagcataacaaattggagaagctcaataacagcaaagtggggccagccatccatatacattcatttgctatgaggatgtctcagccatagggaccagacacacgagtcttccaacagggtactctgttctctgaacagtcctggataaactgcctctctgattcccattttcaataaaaataataatagctaacagtcattgaacaccaagtactatgttaagcatttataagaattatttcagtttactttcatgttagagccatataaaggatactattggctgggcacagtggcccatgtctgtaatcccancacttcgggaggccgaggcgggcagatcacttgaggtcaggaattggagaccagcctggccaacatggtgaaaccccgtctctactaaaaatacaaaaattanccaggtgtggtggtgggcgcctgtaatcccagctactcggaaggctgatgcaggagaatcgcttgaacccaggaggtggagtttgcagtgagctgaaattgcaccactgcactccagcctggacacagaacgagattccaaa

SEQ ID NO: 352 - DNA, 580 bp, Homo sapiens
gatttgatgaaagtgaagctcatgttttcagtcccagttatgcttttacagttgtatattcatgggattgttccacagaaatacgcttatcctctttccagatgagtcatgtactactcatataacacagattcccggaagtgtgccctcatttgcatttcctgtctggcctagacctggctctatttacataacataattgaaaaattgctattttaagggttaatttggttaactcctgttgagattaatgtcctgcaagctctctccagtataatacagtagtaaagagcccttgagtgatttgcttataaaatgaataacaatgactttttacagtatggtgaaaattaactgggaaaatgaatgcaaaatgcttagtgcagttcctggaatatattgtccgtgttcagttaatagcattagcattatgcgtttctgtctacactgaaaacagtgactggacatcactttcatgaaagctaagacttttgaaaatttttgctttttaacttgattctctcaaaatatcatcctaatcagaatcaccactgtagtaaatgttatttattcaatcact

SEQ ID NO: 353 - DNA, 657 bp, Homo sapiens
taaatgattattttattacctctggtagtagctatacatttttagttttaatcagtttttttaatctctttatatattatttttgcttgggtttcattaattcctttaatgaaaaaattgagtgcttcgtaataacaaagggcattctggaaataacagaacaccacaaagatactcttcgaaaagagcaaccccaagacacataatcgttagattcaccaaggttgaaatgaaggaaacaatgttaagggcagccagaaagaaaggtcaggctacccacaaagggaacctcatcagactaatagcagatgtctctgcagaaaccctacaagccagaagacagtgggggacaatattcaacattcttaaagaaaagaatttttgacccagaatttcatatccagccaaactaaccttcataagcaaaggagacataaaatcccttacagacaagcaaatgctgagagattttgtcaccaccaggactgccttacaagagctctggaaggaagcactaaatatggaaaggaaacactggtaccagccactgcaaatcataccaaattgtaaagaccattgacactatgaagaaactgtatcaactaacaggcaaaataaccagctagcatcataatgacaggatcaaattcaagcatg

SEQ ID NO: 354 - DNA, 433 bp, Homo sapiens
agaccaaaaccctaaaaagaggcttgtttgtatagtttacctcatatccacattcagttcatcagcatatcatgttagctctacctttgaaatatatcctgatttttttttttttttaaccaactttttactctccccactgtggcaatcccaatccaagtcatcatcaccccttgcttggactgggggataaagcccaatggctgatctccctagtttcactctgacttctgtcctcaagcccacaaattttcaaaagtgatctttaatggtaccagtctgttaacatgactctcttgttctcacttatccaataactaaaataaaattcttattacggaggtttatattcccaggacttgggatgttcttccaaaaagttttcctaaaactctttttggcaaacttacagataagttttatggatattttg

SEQ ID NO: 355 - DNA, 478 bp, Homo sapiens
cacattccaaagtcttttggcttttcatttaccaccccaatggcttttctttgttttaattagctattgggctctgattattacaggatacttctacagatacacacacacacacacacacacacacacacacacacacaaagagtcatgtaccttataaatatgtgtgatggcgctctcccaagattataccatgtttttactgtaccttttttatgtataaatatgtttatatacacaaatacttgccattgtgttacaggtgcctacagtattcagcacagtaacatggtatataagattataacctatgcaccatataccctgggtgtgtaatacgctgcaccatctatgtgtgtgtaaatactctctatgatgtacacacaatgatgaaatctcctaaagaatgtgagactgtgtatatgtgtatgtgtatgtgtggatatatgtgtgtgcgcatatatacatatgtatatgt

SEQ ID NO: 356 - DNA, 531 bp, Homo sapiens
  misc_feature 475: n = A,T,C or G
gaatcccagcactttgggaggccaacgcaggcggctcacctgaggtcaggtgtttgggaccagcctatccatcatggtaaaaccccatctctactaaaaatacaaaaattagctggtagtgcatgcttgcaatcccagctacttggggtgctgaggcaggaaaatcgcttgaacctgggaggtggaggttgcagtgagctgagattgtgccagcactctagcctgggcaatagagtgagaccccatctcaaaaacaaacaaaaatcaacaacaaaaaatgaaataactgaaactatgtaaaaataaattttgataaatttctgcagtctttcatgttaatactacatctccaaagggataaaatttgtgttactctaatctaatacagaatagaattttaaggccgagtgcagtggctcacacctataatcccagctacttgagaggcagaggcgggagaatctcttgagcccangagtttgaggctgcagtgagctatgattatgccactgcactccagcctgggcgtca

SEQ ID NO: 357 - DNA, 449 bp, Homo sapiens
gagggtatccccataacctgaacctcggctgagactgggaaggacgtggtgcctgggggaggtctgttaaacagcagaaagagtgacctttggtgagtgtctggcacaattttctacactgcctggctccagattcaccaccgtggcagagccaactcctcagtgtaagccccaaggcccccgcacttggctcaccacctggcgagtggcagcgccatggtgacctcagagtcttcccatgatgaatggttcccactcagtcaaaggcacttacaacctgcctcaaacacatgaacactgattgaatccttgttttaaaaaattaggataggccaggcacgatggctcatgcctgtaatcccagcactttgggaggcttgagttcaggagttcgagaccagcctgggcaacatggtgaaactccgtctctaccaaaaatataaaaaatt

SEQ ID NO: 358 - DNA, 467 bp, Homo sapiens
  misc_feature 368: n = A,T,C or G
ccatttaagaacagtttcaaaaggagagatagccacaagaggtcaagctgagatgagcaggaatacgaagccattggaacagagtgagaccctgtctcaaacaaacaaaaacaacaacaaaactttttcaaaagaatttgttgtaagatttttaaaaataccaagcacttttcagtatgtgtgtgtgtagcgggggtaaatatatacataacataaactttaccatttaatcattcttgagtggtttttttggcattaagtacattcacattgttgtgcaaccattaccaccatacatctccagaaccttttcactttccatgattgaaactctggctgggcgtggtggctcacgcctgtaatcccancactttgggaggccaaggcaggcagatcacgaagtcgggagttcaagaccaccctgaccaacatggtgaaaccctgtctctactaaaaatataaaaatt

SEQ ID NO: 359 - DNA, 573 bp, Homo sapiens
gggtatatatgcatacacacatacacattacatctgtgattatgtaatacctttctgggtcatcattccataatctgtcacaaaagtatttctgcagtgaaacaaatgaatattcatactaagtggataaaaaaaggtcataacctaccattaagtttggtgttactgccaaattaattttaacaacaaacttaagaacacaactttcactttccaggatgtttttgaattttgagtaaaaaggattgtgaacttgtataatacagtcagtaagtgtatatttatctgttcactgcagttggactgtctctctaaaatcctggctctgacccttgccaacaacttctatacttctctaaacttctgttttctcattaagaaaatggatagtgcctcatggggttgttaccacaggtatttgaggtaatagatacaaagcatttaacagcatcgggtgtgtaataagtattcaaacattaatttttgtaacaacaaactttttgtattttcagtattctagctacacaaatcttttccataaagatttatgcttgagtttttataattattatc

SEQ ID NO: 360 - DNA, 532 bp, Homo sapiens
gggcagacatatcaaaagagcaaacatgaaagtggtcttgattttagtgtagatccaagtccaaattggttaaggtaaaggatctacagagttacaagataagaaaattatgtgaggttatgcaggaaaatgcttacagctcactttgcaaagacaaaaagatatgagaagaaatttagctgattaaatattgatgagttctccttctgggacactatgtagagtaaacttggaataaatgatgaacattacaactgatcaaaagaaaacacttttaagtagaaaaattgtcttacgggattatcactgtaaaataaacttttcttcttgacttttcccttttgacttttctgtctatatatctgagtaaatataagcctaattgccctcatttatatacacagatagttctaatagtaaaataaaaagaaatagcataccacatactgtgtgtgttcatataattgtgttgaaatttatttggttggtgcaaaagtaattgtggtttttgtcattacttttgtggctctaa

SEQ ID NO: 361 - DNA, 589 bp, Homo sapiens
tttgcccattttctcctttcctaattataattgatgaatgtaatgtataaaactcaaaaagaggctggtttattggcttatcagcactgactttgcagaaaggacaataaaaaacttgatgaagaagggcaaaagtggatcaaatggtgaagttatagacttgaaagatgtataaaatctatgattctaaaatatagtttcagaatgtttagatccttgtaaaaatatattctttccttttctttgtatattatggagtattcttgtgaggtggtggtcttcatgagagttgcacatcacaactaccattggatacatgtgcccaaatcctgctctgggaatttctacatctgtagctgtgggattgtgtctatgcacttatatgtcttgttctaaagagggttctggtatgtactgtgattgaaagacattcctgcaaggcagtgtttcatgaaagcatattctgtaggtcacctatgtcaaaatcacctggggtgttaaagtacaggtttctgtgccccatcctgaagcttttgaacctgaatttttgggcacaggtctcggaaatttgaatttttagtaacatctc

SEQ ID NO: 362 - DNA, 592 bp, Homo sapiens
  misc_feature 506: n = A,T,C or G
ataaaaaatgaagcaatttggccaggcacggtggctcacacctgtaatcctagcacttctgggaggccaaggcgggtggatcacttgaggtcaggagtttgagagcagcctggccaacatggtgaaaccccatctctactaaaaatacaaaaattagccagaaatcgctttaacccatgaggcagatgttgcagtgagctgagatcatgccactgcactccagccagggcaacagattgagactacattaaataaaatatatctttaaaaaatgaagcaatttggccaggtgtaggaagtatcttatgtaggaagtatggagtaataaaaaatgaaacaatttggctgggtgcagtggctcatgcctgtaatcccagcacgttgggagcctgaggatcgcttgagctcaggagttcaagaccagcctggcaacatgatgaaaccccctctctaccaaaaaaaccaaaaacttagcctgacttggtggtgcgtgtctgtggtcctanctcctctggaggctgaagtggcaggatcggttgagcccggggggtggaggttgcagtgagctgaaatccggctgctgtactccacc

SEQ ID NO: 363 - DNA, 579 bp, Homo sapiens
  misc_feature 453: n = A,T,C or G
gggacaattgaaactggaatttaggtggtaaaaacagcactttgggagaccaaggcagtggattgttcaggagttcaccatcctgggtgacatggtgagacatcgtctctacaaaaaatataaaaattagccgggcgtggtggcgtgagcctgtggtcccaactactctctggagcctgaggtgagaagatcacttaagcctggtaggtcaaggctgctctctatcctgggtgacagagtgagagcctgtctcaaaaaaaaaacacgaaacaaaccccagcactacttggcaggaaagcttgtgattggcaaaaaaaaaaagggaacgctctcacagctggcgaggacttggctcctgcctatagtccactttcaaagcaaaagtaaagccaccaggatgggcgttggtgtttccctctacagtgtgggtaacagggcaggccctgcgctcantacccacattcccggctccactggacttccagctctgtgatcactggacacacttccagctgtgtgatcttggacaagttattctacctctctgggcattttttcatctataaaatggggaggcct

SEQ ID NO: 364 - DNA, 359 bp, Homo sapiens
tgcaattgacaacactgtgccttttgcagtcaaattctaatctcttttgacatgatacagtgattcccatgactgaaaatatgttctctggtttacctcatctgcgtctgagtttattaccaggaggcataaatgtgattattttgagagagagagagagagagagagagagagagagtgtgtgtgtgtgtgtgtgtgtgtgtgtgtgtttcattactaaaaagactcaaagtctctatttttccaccatatgtcttctttttcaggagaatgggcaaaccaccaccatatcttcaccgtaacacccttatttcttgcaaaggggtattattaaatacagatatactaattgactcttt

SEQ ID NO: 365 - DNA, 525 bp, Homo sapiens
gagagggaggtgagaggccgaacgtaagataggcaatagtgggtgaagcaaaggccgtggagaggcagacgaaacggactccagcgcaagccacgctgcaaatctctatgccaggcagtttgtgcctctgagctctgccatgccattcccttttcctggatgatctcttcaataaacctttactgagccactcctggggcagggattattctgcaactgtgctgcaaaggtaaacaacctgggctctcttctccagaactcatttccaacacttgaagagacaagtaagaaacttcaagtcagtgtggagagtgctgcaaggaccagtactggacatgatgggagacactggaaagtcccaaacctaatttaaggtgttaggggacttcctggaatcggggacatctaagctgagccctaaagtaggagacagtcagatgggagagagtaaagaagaagacatttcaggccaaatgcctgaataccataccctggagtggtcaggttggttctctggtgggaaca

SEQ ID NO: 366 - DNA, 532 bp, Homo sapiens
aaaaacagcccagcagaccctcacctggcagatgagtgcctgaaccagttgaactggcatgaacctgtgccttcagtatgaaaaaaaaaagctcaccaaacctgcctttactaggttcaccccccaagtcaacctgaaaatcagcccatcaagcctaaacctggctaagctgtactcctcttgccacagacgtctacaacctaagccactaaggcactcacagacatggctgacatggattacagctgaagaaattgcatggagactacatcatgtctccacccaaaaccaaagccaacacaccctacccaactagcataacacccatatacaggaataaatcttcccctaaaaagctactccataaaattggaacaggtgactattcaaccaaatgtgcagattcagcataggaacacaaatatgaaaagcaaggaaacatgacatccccagaggaacacagtaattcttcagtgacagaatccaaagaagaggaaattgacaatatgcccataaagaaattcaaaataat

SEQ ID NO: 367 - DNA, 554 bp, Homo sapiens
gcttctgggtcagagtctagcaacaattttccaactgagccagcctccccctcccactgtcaggcagagctttggatccaccatccttctcaagctttcctagttcctctgatgccctcttccccccacgttgagcccctcaatctgttgggcagcagctcccagcaggaggactctcagccaccggacttcttttccagggtcagcgtcagcattcctggaaccttctgtactaaatttaataacagttaacttttccactggatgcggtggctcaagcctgtaatcctatcactttgggaggccgaggcggacagatcacctgaggttaggagtttgggaccagcctgaccaacatgttgaaaccccgtctctacgaaaaagacaaaaattagcagggcatggtgatgcacgcctgtaatcccagcactttgggaggccgaggcgggcggatcacaaggtcaggagattgagaccatcctggctaacacggtgaaaccccgtctctactaaaaactgcaaaaaattaaccgggcgtggtggcgggcgcctgt

SEQ ID NO: 368 - DNA, 664 bp, Homo sapiens
ggttgataatattgaacatctttttatgagagcaattgccaaatcgttttgtactcctgagttttgagagttctttaaatattttacattcatattgcctcttcattggaaagacttgtattcaaaccatttggagtaaaagtcatttctaaattagggtccaaactgatagtagatattctctgtaataacgatgttattctatttacagtttgttactaaaaaaatccctaattgcaggatttcttcagaaagccctatgttaagcatcttatactacagttttaaaacatatcatacatatcatgttttttttcagctgcacaatcaaattgctgctcaaaaaagccttttatttctatcattctattatttcaattattaaaaatatatataatcaatttcttagtgtctgccttactactagataatgaattcattgaggaaagtatatatgtcttactaaaattgggtttcattgaatgtcaatgttatttgttctgcacgtaaactttgtttccttctgaaaaaaaacatgtaagtcattaagttatctaaaaacacaaaaagtagttagttgaaattctaaattaccagatgaaataatgtttttattgctacataatcaatgtagcaatatcatttgtgaaaaattcactgaaaa

SEQ ID NO: 369 - DNA, 544 bp, Homo sapiens
  misc_feature 325, 458: n = A,T,C or G
atgtgattctgcatcctggtctcttcagagggttcattttgacatatctccagactcatcaactagatgatgtgacggtcctcttctccctgaaacctatccatagtggagattgtgaaatacagcctggcacagcacctacatgatggtgctctcttctcatgcctgggtgctgcccacaggggtcattgtgacatagctgggtacagtcttcaggtgatgtaactctcctctattttggggtgcacacacacagggcattaccatatagctctgctcctcagacctaggtgatgtgactctcctgtctgttacctcctcttanggggtattgtgatatattgctgggcccataaccgaggtgatgtggccttttctcttgcctgggccctgcatacatggtgtacagtaacatatatctgggttgaacacataggtgatgtgactcttctgcatangtcttgccaacaggggtattatgacatacctttctattcattgcctaggctatgtgactctccactcttatctgggcccttccaaa

SEQ ID NO: 370 - DNA, 530 bp, Homo sapiens
gggatctgtgttggcgtgcagggagcaggcagcgtctgcaaatagcgctggcaaccacaacagagaggccagcaacaggaggagcaggaggagcccaatgaagcgtgctgtggaggacaaagagcagcagaggcaggaagcagtgacaaggagtgagctgggaaattccagctgccctcctgtcctacttacaaggaatagcctggaacaagtacagttgactctgaacaagtcaggtttgaactgcatgggtccactcatatgaagatttctttcaacgaaagctaccccgagtgtgcctgcctttcctgcctccccttccacctcctgcacctctaccatccctgccacccctaagacagcaaggccagtctcttctctctccccctcctccttcagcctattcaacttgaagatgacaaggatgaagagctttatgatgatctacttccccttaatgaacagtaaatatattttttcttccttacaattttcttaatagcattttcttttctctagcttaccttatt

SEQ ID NO: 371 - DNA, 541 bp, Homo sapiens
  misc_feature 82, 417: n = A,T,C or G
gtgtattaagtaagtaaatgttatcaatttgggactttgcacaactattattaatgtgacctcaggtcccatgacaaattanaatggcaatcctgggtgagaagttaattttgtcctgaagctggcagaatcaacatgcaccccatttgtgggataggcctgttctctcactccatcacatccaacacctggcaaggacagcttttggtatgctaaagaatttgggaaagatgctgttggtgtaggggcggggagactagaaacaagatctttccatgggcagagctcttcagagcttgataacaaagtttggtctgcagcctttgtcaaataattataaactctccagttgaaacagggaaatgtgggctggcgtggtggctcacacctgtaattccagcactctgggaggctgangcaggtggatcacttgaggtcaggagttcgagaccagcctggccaatatagtgaaaccccatctctactaaaaatacgaaaattagctgggtgtggtgatatgcacctatagtcccagctactc

SEQ ID NO: 372 - DNA, 544 bp, Homo sapiens
cagtttcaacaataccatttccctcaattcacccatctcaaccttaaaatttctctatatctgcatccactgtttcttttttatgaaaacaagtttatctgcccactgcactccaattcaattactcaaagactctttcccagagtgttttaaggcaagaagaaagctttggagtcatctctcaatagttgcttcttaaattaacactattgacatttggagttggataattctatgcagtgggggactggactgggtattgtagtatggttagtgagcctctatccactagttgcaagtggcactgcccccttcagtggtaataaaaaaatatgtctctagaaactgccaaatcacccttgttgagaaccactactctagtcaattgtatctttactctctccttctttgttgggatttaagggtgaaaattcatcgcatgccttcctgagttggggccagttgaaaaacaaaaacagaacttgaaaacatggccatcagaatataatttcactgttgctaaagctggccccagtgcacaagt

SEQ ID NO: 373 - DNA, 610 bp, Homo sapiens
gtgtgattttttaagtggatttaagataacctaaacattacagaggattttcatggttttgattcatgaaatcataatgttatacaaacctaactgaagtgttagagccttgaagatttttcccccgaattacatatagtaactctacttgtatttaatactgaaagcatattttacttatttaagtgagacaaagtaaaatttagctgaatactttagatctatcatttccttttcctgttgtaagaacattacattgtgttgaaattaaagtggatatagaaggtaattagaataaactgccacatcatttttatagtaaagtggtaataacactattgctttctgtttttttaatcagaaggagtatgggcttataatgatgttactgttccctgaagcatattttgaatgatacggtttatatttgcacagttgcccaggtaatcattgtgatattaattgatcaatttgctatttatttgcgttttaaatcagtactagtatttgtgcttaaaaattttgcatatgttatatcagatttaatttttaagtgtcagatactaaaacaaataaccttaactttattaaattataattttttatcatg

SEQ ID NO: 374 - DNA, 608 bp, Homo sapiens
cttgttcttttggccgaacggcctacggctgcgagaagagacagaggggggtcttcactgaaaacagaggatgaagtgaaagactgtacccagaatactgatggctagaagatttatggatccctctcagaaggcacttgttgaaagaaagatctgtataaaaatggacctttgaaaattctggtctaataacatcactctgagacttagcaacagtaacccttgcccacatatatagcctttacattcagctttcatgggacttgctgtcaaatgttgatagccaaggttcaacagacatttgaaaaaagtacctttaaaacggggacagataacagaaacattaagaaaactggagctaaaagggagaaactggagagaacagatggaagtttgacaacactaagacttacagagataaagaaaatagtgcatccatgaaataagactagaatgctggaaaaagaaacagacggagaaagaactcttagaaataaaaaatatataaagtaaataagcgatagaggggggaaaatgttaataagataggtagaaaataaggaaatctacctaaatacagatcaaacagaaaaagaagtaaaacagac

SEQ ID NO: 375 - DNA, 498 bp, Homo sapiens
gattgatgtcgcgaattacatcattttatattgtgaatctattggcacagttatatagtcatttttaagtctttgttatctcaactacatagcagaattaaaagtattctgtgcatcttcattataataacaaagaatattataattctgtacataattatctgttagaaaactttatattttacataattctatgttgctctcatcattattttattttttaatgtgaatgactagcattttttaatacaggcctagtgtgcataaattaatacagttttcgttgatcttgaatattctttatttttattttttaattcatttgaaatgatagctttggcagacatagtgttcttggttggtatttgccatttttttcagcactttgagtatgtcatcctacaacctcttgcctgcatgctattggctgaaacatctgctggtcatcctataggggtaacattgtacatgctaagtcattttttcttgctgacttca

SEQ ID NO: 376 - DNA, 541 bp, Homo sapiens
gacagaagggtaaattatttttctcctttttttttctgttgccactttgttctctagtgtttaaaatttaaagattttattgaggagagtgatttacaatcagaccttaagcagttagggagctcatcctgcggtgtttgaggggaaagctaatatagggtaaatgcagaagcagcgcaaagaaattatttgatttcttaatgtttgagcagttgccttatttggactaagtgggaagttcaagacattgtaactaatacctatttggccacctgtgattggctgagtgtgtttcattttcattaggaagccgggtttgtttaattttaattcttttgagttatgtgtagcaatctatttgtataaatataaattgtaaaaaaaaattatgtaagtgaaccacctgtgttatgttccaaaattttctattttttatgttgttcctcattgccttcattgtatcaaacactaaaatcatgggtattaatgaaagcaagtaaaataatagtgagtttgctttacagtgaatcaataaagtctg

SEQ ID NO: 377 - DNA, 535 bp, Homo sapiens
gcacttgttagaaagaaagatctgtataaaaatggacctttgaaaattctggtccaataacatcactctgagacttagcaacagtaacccttgcccacatatatagcctttacattcagctttcatgggacttgctgtcaaatgttgatagccaaggttcaacagacatttgaaaaaagtacctttaaaacggggacagataacagaaacattaagaaaactggagctaaaagggagaaactggagagaacagatggaagtttgacaacactaagacttacagagataaagaaaatagtgcatccatgaaataagactagaatgctggaaaaagaaacagacggagaaagaactcttagaaataaaaaatatataaagtaaataagcgatagaggggggaaaatgttaataagataggtagaataaggaaatctacctaaatacagatcaaacagaaaaagaagtaaaacagacaaggtatttagattattagtgtagaatatttgacatatactaaagggggatcaaaaggaag

SEQ ID NO: 378 - DNA, 531 bp, Homo sapiens
tacatctttaattatcctggtgtagtctaaagaacccaaattttatagccaaagagactatcctgatattttccctggctttgtaaactcggatagattgcttattgttttttgtttgtttgtttgttttttcttgagacagtgtcgctctgtcgcccatgctggagtgcagtgtcgcagtcttggctcactgcaacctcaacctccagggatcaggacctctcatctcagccacccgagtagctggcactacaggcacatgataccacaccccgttaagttttgcatcttttgttttgccatgtttcctgggctggtctcaaaatcctgggctcaagtgatcctcctatcttggcctcccaaagtgctaggattacaggcatgagccaccatgcccagcccattttgggtgttttgtggtattcttgaagtgtctccaaaatttatatttagttttcttattgccattatatatatatatatatttggttacttagtatcataaggaaagaagtttatactttgacagta

SEQ ID NO: 379 - DNA, 400 bp, Homo sapiens
  misc_feature 102, 237: n = A,T,C or G
gggtgcttcatggtgatgtaattagacagttttagaactgattagacagcctcaagagtggagataatagctgggcgtggtggctcacgcctgtaatcccancactttgggaggctgaggttggcggatcacgaggtcaggagatcaagaccatcctggctaacacagtgaaaccccgtctgtactgaaaagtgcagaaaattagccaggtgtggtggcgggcgcctgtgatcccanctactcgggaggctgaggcgggagaatggcgtgggcccgggaggcggagcttgcagtgagccgagatcccgctactgcactccagcctgggcgacagaaagagactccgtctcaaaaaaaaaaaaaaaaggggaaataataggccaggggcgggggtttaccc

SEQ ID NO: 380 - DNA, 596 bp, Homo sapiens
ggggacaattgaaactggaatttaggtggtaaaaacagcactttgggagaccaaggcagtggattgttcaggagttcaccatcctgggtgacatggtgagacatcgtctctacaaaaaatataaaaattagccgggcgtggtggcgtgagcctgtggtcccaactactctctggagcctgaggtgagaagatcacttaagcctggtaggtcaaggctgctctctatcctgggtgacagagtgagagcctgtctcaaaaaaaaaacacgaaacaaaccccagcactacttggcaggaaagcttgtgattggcaaaaaagaaaagggaacgctctcacagctggcgaggacttggctcctgcctatagtccactttcaaagcaaaagtaaagccaccaggatgggcgttggtgtttccctctacagtgtgggtaacagggcaggccctgcgctcagtacccacattcccggctccactggacttccagctctgtgatcactggacacacttccagctgtgtgatcttggacaagttattctacctctctgggcattttttcatctataaaatggggaggcctgtggacagattccttg

SEQ ID NO: 381 - DNA, 582 bp, Homo sapiens
  misc_feature 301, 447, 524: n = A,T,C or G
gggtacttggcctttcccacccataattctgggaaaaccctctctctgggagttaatcatcctgcagggagtttctgctcctaagctctctgctgccctctgctgggaggcagacaccttttcccttgctgcaccatggagctctagttctttgagtagcaagcacctgccaagatactccacccttcccacattcattctttcctttcccattcagcaaatacttattgaggatatcctgtataccaagaactacaggccctgggatacaaggtgaataaacttggctcctatctcttangacctcactaaggcgaaagacagaagggttaataacaattagaatatggcttgagaaaggccagacgagagaaagcagaagataaagggagactaggagaaaagaaacgttagcaatgctcacaggagagaggaagccttcactanggttttggcagctgagctgagttttaagggatgggcaggagtaggcaaattgctggagtcttggatttatagactangagggatggaaaggatactggaaattacattttggttgacttaataatgaaccatcca

SEQ ID NO: 382 - DNA, 432 bp, Homo sapiens
  misc_feature 259: n = A,T,C or G
gactcaccctgcttgctttgtggctatcatcaaaatcaccaaccaaaagattcacctttggatttcatcgcttaggctggaatgcaatgacaccatcatagctcactgcaccgtcgaactcctgagctctagaaatcttaccctcgcagcctccagagtagctaggactgcatgcatataccaccatacccagctaattttttaattttttgtacagacatggtcttgctttgttgccaggctggtcctgaactcctancttcaagctatccttccacctcggtctcccaaagtgctgggattacaaccataagccactgcaccaggcctgatgaatggaaccttttaaagtcactaatagtccaggcactgtggctcatacctctaattgcagcactttgggaggccaagacaggaggatcacttgagccc

SEQ ID NO: 383 - DNA, 594 bp, Homo sapiens
  misc_feature 512: n = A,T,C or G
agaggggttttctgtaaccagtttctgctttgcctgatctagtagctgtccacatattcaggtaatctattcctaagtagctttcaagcagtcagaaacaggattgcattgcttgtacttttttgggcgggtgtaggttatggagaaaggaaattggataaagatcacagagaagaagattatgatggtgccggtgtcactgagagatctactgacccgatgttgccttcttttgctgccttgtgtgtgctgtacgtatcctgcgttaggacccttgctttggcagcgttagctacaaagtagtggaatgtcccatgcagttatttctgtatttctgttaggtctgttcctctcaatctcctcagactgacttccatatcctcgtttctcaagagtgtggtgcccccagaccagcagtatacacatcaccaagagctgattagaaatacagaatctaaagctccagcccagacctgctgaacccgggatctgcatttaaacaaggtccccangggattcatttgcattggagtttggattcactctggagtttgagaagcacttttgttctcttcctacttttctacttctaat

SEQ ID NO: 384 - DNA, 507 bp, Homo sapiens
  misc_feature 168, 373: n = A,T,C or G
gggatttttccatatgaatttaaaatagctggcttggtaatgcctttaaagctttacaaatatacttattaaactaaatctttgaactattattatatttatactgttaacaactaatggatatctatgtctttaaaaatagatgctttcatgtttttaactgcttangaagaagtgcttttttgaagattgcttgcacaactttattcctgaatttttactctgacctttgtgctcattttttctgaattcttatgttctgtgacctgctttgccctttccctaagccccttcattgaagagtcatcaagaaacacgaattggcctggcacagtggctcatgcctgtaatcccagcactttgggaggctgangtgggtggatcacttgaagtcaggagttcgagaccagcctgaccaacatggtgaaagcctgtctctactaaaaatacaaaaaattagctgggcgtggtggcgggcacctttagtcccagctacttggatagctg

SEQ ID NO: 385 - DNA, 562 bp, Homo sapiens
tttacaaaagtaactcaagacattgaaatagacgaaaacagaaacacataaagctaagtagtgaaagttctttttaacagttttattgagatatcaacatataaaaattgtatgtatttacggtatacaactgtgatgtgtttgatatatgtatacattgtgaaataatcaccacatgaaagctaactaacatatccattacctccgcatagttacatttgtgtgcatgtgtgcatggggttgagtagggagatttaatttaggacttgtcctcttagcaaattacaagcatgtaatacaacattgttaactatcatcaccatgcagtgagtgcattagagctccagtaattattcgtcttgcataactggaactttctaccatttgaccagcatcagcccattttcaccttttcgacaatcccattccacccaatctctaccctcaaacagtctccattaatttggcatgtatatttctaggtttttttctatatacatatgtacagctatattatatatgactttacaaaaatgagattacttttgtatcagtaggatta

SEQ ID NO: 386 - DNA, 593 bp, Homo sapiens
ccttcctgttggccactacatacgtgtcccccgcttcttgcccctctctgcttgggtccctgctacactggtatcctgcactttccaccttgtattgccagtttgtttccaaggccatctccactttgagcttgttcatgaccacctcacacagcacacttggtctgtgtggtggtttgaggggttctgtctgtacactgtgctttggctgtgttggaggcgggcaggtgggaaggaagaaatgtattcttggggagatttgtttttagagacatgagacatggaaaatagttaagtaataatataatatgggaggcatggactatcagaggaggcaggcaggactgcccaacctcctcactgggcacgttacgctacttcctcctgacctctatagtcctttgcatttatcaagcactgtcatacgtgttatctcatgcaatgaccagggtgtcaccccctgttttgtaagtgacaaaactgtcactcagagggatgaaatgacatgctaaaggtcatctagttagtaatggtggaatcagggctggagcccagtcttctaagcctaattcctattctgctcttcatcatct

SEQ ID NO: 387 - DNA, 533 bp, Homo sapiens
  misc_feature 297: n = A,T,C or G
ggggggctgctggactggatggtgcagagaccgcttccatcactgcagaaagctctttgagcccagtggttctcaagcaggggcaatctaccccacctcccctgggcacatgtggcaatgtccagaaaccccgcgactggagcgggtgctgtggcatgtaaagggtgggggccagggatgcagctgaatatcctataatgcataaggtaggcccccacaacaaagaatggtccatccccaaatgttaatagtgctgagattgaaaatcctgtcctggcctcctgtggttcaacctanctgggcaagcagaggaggccgtagaaggaagtaagggaaaataattttacttaggaataaaaatataggctgggcacagtggctcacgcctataatcccagtactttgggaggctgaggcaggaggattgcttgagcctcggagttcaagaccagcctgggcaacatggtgagacttctttaccaaaaaataaaaaaattagctgggtgtggtggcacacacctgtagttgatctc

SEQ ID NO: 388 - DNA, 522 bp, Homo sapiens
ggaactactgtctagtagtaacaatagttttactaggtatgaatttgcatttatataaatagcaaactttgttagacattagaagtatacctactggagtacaccacatagaaaacaaatgttttactcttaaatatgtgtatgcctgtatatatgtatttatttaaagctcttatgtgaatctggtgttcataataggaccattaataaagagagaggcaggctggactcaaacattatgattctttagttttgtcattcaaaaacagaatgagttccagttcgttcagaatgagccctctaacaaataattgtaagtaggtatatatactttttggaaaatggagaaaaggacactagaagactaactttaaaaactgtattcccgggccgggcacagtggctcacgtctgtaatcccagcactttgggaggccgaggtgggtggatcgcgaggtcaggagttcgagaccggcctggccagcatggtgaagccctgtctttactaaaaaatacaaaaatt

SEQ ID NO: 389 - DNA, 475 bp, Homo sapiens
gggccgggcgcggtggcgcgtgcctgtagtcccagctactcgggaggctgaggctggaggatcgcttgagtccacgctggtctcaaactcctgagctccagcagtcttcctggcttggcttcccaaagcgctgggattacaggtgtgagccaccacacccagctgattctttagaagaccagtattgcattgtgattgcctctgggcaggaactaaggggcatcagtagactatgcaattactttcttcctctttaaaaaagtattgttaatttttaaatttacatattttggtatacaattctatgagttttgacaaatgcaaagaatcatataaccaccgccataattgagatactaaacaattctatcacctcaaaaaaaatcctcttgagctgtctcatttataatttttgtgattaaaaatggttatttttcaaaaagtaacgtttgggccagtgcgcctggagtgcacc

SEQ ID NO: 390 - DNA, 546 bp, Homo sapiens
gaaataatcaccacattgaaagctaactaacatatccattacctccgcatagttacatttgtgtgcatgtgtgcatggggttgagtagggagatttaatttaggacttgtcctcttagcaaattacaagcatgtaatacaacattgttaactatcatcaccatgcagtgagtgcattagagctccagtaattattcgtcttgcataactggaactttctaccatttgaccagcatcagcccattttcaccttttcgacaatcccattccacccaatctctaccctcaaacagtctccattaatttggcatgtatatttctaggtttttttctatatacatatgtacagctatattatatatgactttacaaaaatgagattacttttgtatcagtaggattatttgatttgcaagcaatagaaataaactctggctgacttaaggctgaaaaggaatttattggaaggatatgaggtaggtaaagagctgaagaactgagcgggaaaacatgaagagccacgctggtaaagcaacttccatgacac

SEQ ID NO: 391 - DNA, 576 bp, Homo sapiens
  misc_feature 399, 408: n = A,T,C or G
agaagggagggtggtcagagagaggctgaatcttaatgaatgtaacactttgtcagatatataagagagggcagtccttctggtcggtgccgtggccaagctctgcagccagtgtgctggtctgaagggccagcggtagcaaattgacttacaccttaatgtaatgggaagatacaagggcacgtatataggctgggcacattggctcacgcctgtaatcccagcactttgggaggtggaggtgggtggaccacctgaggttggaagtttgagaccagcctggccaacaaagtgaaaccctgtctctactaaaaatgcaaaaattagccgagtatggtagcgcatgcctgtaatcccagctactggggtggctgaggcatgaaaatcgcttgaacccangaggcagangttgcagtgagttgaaatcatgccactgcactccagcctgggcaacagagtgagactgtctccaaaataaataaataaataaataaatgcaaataataaaataaaagaaatttttttaaagaaagatgatagggctgggcacggtggctgacacctgtaatcccaaca

SEQ ID NO: 392 - DNA, 555 bp, Homo sapiens
agaggggaaaatgcactcttgatttttctaaacagttatacatactacagccatggtgatcatcttaaaacagtagcagaccaatggttctcaaaagttactagatattagaattatgtggagagtttttaaaaagtaactgatgcccatattcttaaccaagtgtattagtttgttttcacactgctataaagacatacttgagacagggtaatttataaataaaagaggtttaattaactcacagttcctcatggctggggaggcctcaggaaacttacaatcatggtggaaggggaagaggcatgtcttacatggtagcagatgagagagagtgagcaagattgaggaaaactgccttataaaaccatcagatcttatgagaactcactcactattttgagaacagcatgggggaaaatgcccccatgatccaatcacctcccatatggtacctccctcgacacatggggattatagggattacaattcgagatgagatttgagtggggacacagaaccaaaccatatcaccaaagtaatgaatcctttcta

SEQ ID NO: 393 - DNA, 292 bp, Homo sapiens
ttcctggtgagaatccccatgacagtcccacttttcagtggaggagaacaaaatatctgtctactctcttgaagaaggacacggctttgatcatatttgttcaggcttgacttggccggaggttttaagttcttactctcaagtcagcagtctctctctctctctctctctctctctctctctctctctctgacacacacacacacagacacgcacgcacacacacgcacacacatacacacgcgcacattctctctttctctttctctcattccccgtcatattttctatg

SEQ ID NO: 394 - DNA, 604 bp, Homo sapiens
cgacagaaggggatctgtgttggcgtgcagggagcaggcagcgtctgcaaagtagcgctggcaaccacaacagagaggccagcaacaggaggagcaggaggagcccaatgaagcgtgctgtggaggacaaagagcagcagaggcaggaagcagtgacaaggagtgagctgggaaattccagctgccctcctgtcctacttacaaggaatagcctggaacaagtacagttgactctgaacaagtcaggtttgaactgcatgggtccactcatatgaagatttctttcaacgaaagctaccccgagtgtgcctgcctttcctgcctccccttccacctcctgcacctctaccatccctgccacccctaagacagcaaggccagtctcttctctctccccctcctccttcagcctattcaacttgaagatgacaaggatgaagagctttatgatgatctacttccccttaatgaacagtaaatatattttttcttccttacaattttcttaatagcattttcttttctctagcttaccttattgtaagaatacagtgtataatacataaaacatacaaaatatgtgttaataaactgtttatgttat

SEQ ID NO: 395 - DNA, 510 bp, Homo sapiens
  misc_feature 299, 437: n = A,T,C or G
gggaagtcctatcaatgcaaaaaatatgacaacatgagctgcttatcatgaaataagtgttttccaattaactatcctgcttcatcagcaggtaggaataatagaatctatacctatgtcttcatgggaagttctctatggccagttgattagtgagggaaaaattgagcctgatttacagaagtcactgtacaacatcacagcagcagccaaaagtagattgcttaggcattataacctacgtgaatgcaattttaaaagaaattcagcctatgtaattggttgtccacgatgtctanaaggagagatattattgatgtatatgtggcagctaataatttgtctagataattagggacttggggccaggcctgatggctcacacctgtaatcccagaacttttggaggacaggacaggtggattgtctgaggtcangagttcgaaaccagcctggctgacatggtgaaactccgtctctactaaaaatacaaaaattagccagatgtgg

SEQ ID NO: 396 - DNA, 555 bp, Homo sapiens
  misc_feature 290, 382: n = A,T,C or G
gctattatttctatttaaagagacaagacactagggcacagagaagttaagtaatttgttcacagtcacagagttaattgaaagcagagccatgatgtgaactgagatattccatctcctggaggaattcatctgtatctaaatccaaattattactgagctttgagctacgatatctctttctttctttttttcttttttgagacagagtcttactctgtcacccagcctggagtgcagtggcgtgatctcggctaactgtcgccttgacctccctgggctcggctgancctcccgagtagctgggaccataggcatatgccaccacgcccagctaatttttgtactttttgtagagacaggattttgccatgttccccangctggtctcaaattcttgggctcaagggatccgcccgcctcagcctcccaaagtgctggaattacaggcatgagccactgtgcccagcctatgatatttctgtaagaaaaatattggttatagccaccaagttatgttaccacaaaaaatgactcattattagcttcaggctg

SEQ ID NO: 397 - DNA, 607 bp, Homo sapiens
gggtgcttgataaatgaatattatcgaataaacacataaaagcataatatgatgtagctgcagaaacagaggcaagcaccaaactctacgacaatacagagtaagaaaaagcacagagactaagtgtcatttatgtatcaacagagaagtataccagggaacattctatctcagagaaactagacttgtgatcaattaatagcttgtcaaactgccagtaaataatgaataatgaaggtgggatttgagctcaaattgaagtaggttcagattccatacactttacactcttccacattgcctttcctttcctttctcccatggacagggtagtttttattagcttcctacagacaaaagatacaacccccctagcttaaatcaggaagaattagatatcctgaacagaccaataacaagcagcaagattgaaatagtaatttaaaaattatcaacaaaaaaaagtccaggactagacagattcacagcagaattctaacagacattcaaagaagaattgttaccaatcatattgacactatttcaccagatagagaaagggggaaccctccctaaatcattctatgaaaccagtattgccctaata

SEQ ID NO: 398 - DNA, 575 bp, Homo sapiens
acagaatccaatatttaataagcaggaaagctatatgagatgagactggaggaaaacttgatatactttatacttcaggctagtattatcagaattccttttattctcaccagatgtgtatatatctatctccagccacagaatgggaaaaataaatattttaataaagttctaaaaaaagccatgtgaagattttgagttgagtaccaacaaaatcagatttttatttttaatgaaaaacaatgttttatgacatttatattttgagaaaacctaaaagatttcattttactaattttatttggtatatttgaaaaattcttttgtgttcgacaagaaatatttaattcttttttaaatacactaagcacagtcatgtaacctacaataaaaatactaaaaaataatattttaaactgacacattttgttttttagatgtagttgatttaaaagtctctacttatgagtttggtaaaaaataaacaaagatgactaaaatgaaaacaaacagaagattcagaaatcaaatttagaagagttgccaccattctcacttgcatttgctacagactc

SEQ ID NO: 399 - DNA, 595 bp, Homo sapiens
  misc_feature 473: n = A,T,C or G
aatacatatatatgtaaaggggagtttattaagtattaactcacataatcacaaggtcccacaataggctgtctgcaggctgaggagcatggagagccagtctgagttccaaaactgaagaacttggaatctaatatttgagggcaggaagcatctagcacaagaaaaagatgtaggctgggaagctaggtcactctctcttttcacatttttctgcctgcttatattctagccacactggcagctgattaaattttgaccacccagattaagggtgggtctgcctttcccagcccacagactcaaatgttaatctcctttggcaacaccctcacagacacacccaggatcaatactttgtatccttcgatccaatcaagtagacactcagtattaaccatcacaacctggtactaggagtgcaggaaatgcataccgttaaatctatgctgatgctgagtcaggctcaccanatactagccaagatgcttgtttttgaaggcacatgagtgagttaacatggagagactggagtcagaacagaaataaatgatgacgtaagtagatgaaatagtctgaacagaaaacatttccc

SEQ ID NO: 400 - DNA, 623 bp, Homo sapiens
ggaatcccacaagtatattatttacattttttgatatgttacattacattacattctgtcatgttgcatttcatcaccaatggacagaatgttgcataacctcatatgacatgatgacaggtctcattcattctgtctctctcttcctctctccctctctcctctcacacgtgctctctctctccccctccctccgtccttccctctctccatctctgtgacacatgcacagacacacacacacacacaccacaaaaacgttcatatcaagaggtgagtctaaagaaatattttgaattttggcccctgtaaggatcctggaagccctccaatagtgacatttacaacttcaccaaagccatggtccttttatgacaataacaccaaattgccctggacagagatgcataagcttactcaatatatattttgccagttgtttgtaattatttttaaatgtgtcattatgatgtacagtgaaccacaaaagcacatgttcggtaatgtaaaacaacaatatgtcgcatattagcctcctttaaagaaatattcaaaacacaaattacaaagtttaaaaatacaccattggatgcatgtccctacattgctctgtgctcatttct

SEQ ID NO: 401 - DNA, 577 bp, Homo sapiens
  misc_feature 134, 444: n = A,T,C or G
tctaactacactcacacaccctataacacacatacacacacacacacactctaagtaaagtgttgttgggatattaattaggaatgtccctgttttattgggcaagtgtaatgccagtctgctgtataccatanaaacaggagggcagaaccagcagcagtgtgagcttggccctggacccacttcactgctagacagatgctctcatgctgcaccattgcaagtcatcgttgagtcaccctggcttccatgaacttgctgacctttaatgggtctgcaactgccctttcaaatcacctgaaaaataacggagcctattaattagccaccttcctaaaagcaacatgtcaggggaaagacactgtgaggatgagtggagcgcaaggtggagcttcccagggccagttcagaggacatgggacagcaccgtggtctaaagcccangtcctggactccaccaaacacatatttgagtcctggctctgttacttatcagcttcaagggaataagtaacttgccaatgctacacagaaagtaaattcctggccaggcacggtggctcatgcctgtaatccc

SEQ ID NO: 402 - DNA, 547 bp, Homo sapiens
  misc_feature 445, 478: n = A,T,C or G
gcaaggaaaccaggaatgtgataatgcctggggctgggagattatggaaattgtcagtcacccaaaactgactctaaataggcctccatgttgaatttagtagtcaaagacttcaaagcacctattgtagatatgctcaaccaaagggcattaaaagaattaaaggaaaaattgtcttaatgaatgagtagatagggaatctcaacagagaaattacattattaaaaaaatggaaattccagagctgaacaagtacaataattgaaataacaaacttgctaaacagtctcaatagcatattggagatggcagaagcaagaataagtgaaattgacaatagatttttaaaaatggcccaatcttaagaatagaaagaaaaaaatacccacaaaaaacactatcaaggagtccagcacacaaaatccaagctctgcctgtgcattangcttcaggacatgagggaatggcagtgaattanggctgcactatgccaggaacactcatttaccacaactggatttgtcagcagttcgagtgaactttcctt

SEQ ID NO: 403 - DNA, 570 bp, Homo sapiens
  misc_feature 251, 352: n = A,T,C or G
gaggctggctgtggttggtgatgaaggagtaagcaactgatgatctaggagacagatgaacaccagagaatctctattcagtcaacctgtggagatctagcagaaagatggtgggaggagtacaaaccctgacatcagtctcctctcactacccgatatactgtaatgcctcctactggacacactcaaatggaagtcagcagttaaggaagccagtggatgcaatcctatagcatcagcctcctgctcangtagtgataggcagtgagaatctgttcgggcacaagatgaggttgggaagaagggagaaatgtagacagtgcacttggtggggcaaatagaggatatctangcagcctgccccttgtttactaattgctgctctttgattcttacgttctgttcatgtaatgggaatgcttgttaagattttgttgttggccgggcacagtggctcacatctgtaatcccagcactttggtaggccgaggcaggcagatcacctgaggtgggagttcaagaccagcctgaccaacatggagaaacaccgtctctactaaaaacacaaaa

SEQ ID NO: 404 - DNA, 400 bp, Homo sapiens
  misc_feature 207: n = A,T,C or G
cagtgtggtgtctcacacctgtaatcctggcactttgggaggccgaggtgagcagatcacttgaggtcaggtgttccagaccagcctgggcaacatggcgaaaccttgtctctactaaaaagacaaaaattagctggaggtgctctcttgaacccaggaggcagaggttgcagtgaactgagatcatgccactgcactccaacccangaggaggaggttgcactgagccaatatcatgccactacactccagcctgggcgacagggcaagactctgtccccgccaaaaaaaaacagaaaaaaaaaaaaagaaagaattttgaggcatttatgaccaaatgttaacatctgttttttcacgtggggggtacaggcgtgttttgaaaccttctatgcttcct

SEQ ID NO: 405 - DNA, 455 bp, Homo sapiens
tcacaaccttaggcatgaaaaaggattgacagagattactgcttgaattattactccaaatcctgtgcctctaaccactaacataaccacttcatttgtttactccttcatttatttaaaaaatttattcatctattgaatgaatgtttacttggtctcagatatacctatgatacctgctagaccttcctaatccccatttgtcaagaaagtgccaccaccctcacattagggataaatgaaaatgagggtgaattatattcaaatcaaggtttatcagcctggcgtggtggctcatgcctgtaatcccagcactttgggaggctgaggtgggaggatcacctgaggtcaggagttcaagaccagcctggccatcatggcaaaaccccgtctctactaaaaaaatacaaaaattagccgggcgcagtggtgtgcacctgtaatcccaactactc

SEQ ID NO: 406 - DNA, 536 bp, Homo sapiens
tagcagggtagtagaaatataatgcacacaagaatgataatcatgaagacaatctgattctacaagagtaagggaacctattccattagagagccaactgaaaacatcaaatcccagttcacaccccagggtgtggggtcacgtgcctgtagtcccagctactcgggaggattagtagggaggtttgcttgaattcatgaagtcaaggcaggagtgcagtggctctctgcaaactgtgcctcccgggttctagtgatactcccacctcagcctcccaatttgctgggactggaggcatgcaccatcacacctggctaatttttgtatttttttgtagaaaacggggtttcaccatgttggtcaggctggtcttgaactcctgacctgaagcggtccgctcacctcggcctcccaaagtgctgggattacaggcgtgggccactgcgcccggcccaactttcctgattttgataattgcactgtgattatgtaagagaatgcgaattttcttttcttttttgagatggagtgtccac

SEQ ID NO: 407 - DNA, 300 bp, Homo sapiens
ctacaacaacgctccaataagcaacacaaactcatgcgtcctgataatcaaagctctttgaatgagcaagaaatagtaaagaccttataggaagtaaatgaataattagcagatggaaaaagcgtggagtaacaacgcaagtagttctgtttcttcacatcttaacctaggcttttttttttttaaaattaccttttgaatccgcagcaaggaaagttccttttatggagggtgcccccttacaaatggagcaatggggaccgcacacttggacaagggaggggaaggggtttttatccg

SEQ ID NO: 408 - DNA, 559 bp, Homo sapiens
ggaggacacatgtttctatcagaaagatgattcttcagttaaatgaacatcagagattaaaatgtacagaatttatataataagtaattcttactggaagcctgtttcattcccaactcgacctttcagagcacacaacaaccatatttcaaaaattcctcttctattagtgacaagagccatcttaacttccactagctcaattcctcatttccattctactgggagccatagaaattacctaaatacaagaaatttagaggttgagttgtaaaaactcagaaagggtttcataaatacttatatacatgatctctacatttgaaatatgcctaatttaaatagttatacagaactgtgtctgtgcatatgcagatatatatgtgtatatatatgtgtgtatatatatatatctccagtatgtagatatagatatacatgtatgtacttgtatgtgttcgtgtgtgtacttgaaacacttttttgcaatgattagactttttattgaaagttactataaaatttgaagaacaaaaagaacaaaagtttactaacattc

SEQ ID NO: 409 - DNA, 624 bp, Homo sapiens
agggaattttgaaaaatgtgtcaggcattccatcctttttactctgtatgaatttgatggcctcgttagccatcattgtcttttcaacacgttgaaacctccacattgctgaggctaatgtggttagagcacctgttctcagtggtccgtgaaccagcagtatcagcatcacctgagaccttgttagaaatgcaaattatcaagcccatttctagatctccttaatcagaaaatcagggtgcagggcccaggaatttcctttaataggccctccagatgactctgatgctcaacaaagtttgagaatcacttgtttagtcccaaacctgtgtttggatgccatttgcattacttagaagctaactggggactagttactttatctttggcctctttatttctatagaaagaggacaaccctctctacctattaaggtcatgatggggaattaaggtgacatgtataaacgttttgcgcataagtgcttggtgaacaataactgctggtatttggtaccatcttttaaaagccatggtggtagacagtgagaagaaaaggcataaaaggtgggcccagccctaacaggtttgcagtcaagtagaggtggcttacatataaataat

SEQ ID NO: 410 - DNA, 499 bp, Homo sapiens
  misc_feature 399: n = A,T,C or G
ggcctgtagtcccagctactcaggatgctgaggcagggaaatagcttgaatccgggaggcggaggttgcagtgagccgagatcataccactgcactccagcctggtgacaaagcaagactctatctcaaaaaaagcaaacaaacaaaaaaacacacacacacacacaaaaaaaagagaaagggagacagagatagaaagagagaaaaaactaaaacactgttagcaaatacatgtaacaatgaaaaacgaaaagtatctaagacttgttaaactgtattttaaccttgtttgactcacagattcatttcgaagtaattatgatataaaaagcccaccctgttaagaatttctaaaatcattatatcagtgggcacagtggctactgcctgtaatcccancactttggggaggcgaggcaggaggattgcttaagcccaggagtttgaaaccagcctgggcaacatggtgaaaccccatctctacaaaaatgcaaaaatt

SEQ ID NO: 411 - DNA, 498 bp, Homo sapiens
  misc_feature 396, 424: n = A,T,C or G
cgcttgctctgccgggagctagaaaggaacggatctccatgctctggacctcattagcgaaccttaccttggaggcagctgagagccctcccgaggggtcctgatcctgggcaccagctcgctctgtgatctacctaagcccttcaatcccccgactctgcaatgtgaaatccaaatgctcccggtgtccttgtagctctgtcaccctggattcttgtggcaaagagagatggatctcagtgggaggctggttttggatggagggccacagggactcatggtcttggtggtggttacagatttcttgagaaatgtcattctttggccgggcacagtggctcacgcctgtaatccagcactctgggaggctgatgcaggaaggtcacttaagggcangagtgcgagaccagcctgcataacatanggaaacccggtttctatgaaaaattaaaaaattagctgggtgtggtggtgcgcacctgtagttccagctacttg

SEQ ID NO: 412 - DNA, 649 bp, Homo sapiens
  misc_feature 398, 542: n = A,T,C or G
gggtctcaaactcctgacctcaggtgatccaaatggatcctcagcctcccaaatgctggaattacagccgtgagccaccgcacccagcctgttattactattactatcattattgctcctcctcctcctatactacagcaagagcgcttgaaccagatgtaggggagatagcagctggagagcataacagaggcactgacatgtgagcagctaacgaggccttttacaagacatctgtgaccacacggccaagtagaagaaagccgttaaaagcatcaaggtagttaggtaaagctgagtctgaagtaagtaaaacattgttacaggatccttggggtgtcgcttttctggccagaaacctctgtagccagtggcgcctttgcctgagttttgctcangcccactgggctctttctgcccacacggcctggcaacttatatgtatttttgtatttcatgtgtacattcgtatctatctgtctatctacctatctatctatctatctatctatctatctatctatctattccccacagtgaanataatctacaggataggtaaataaattaaggcatattcacgcaatgggatacgatacagtgatgaaaatgaactaattatagctacgtgaaactatactcatgaaca

SEQ ID NO: 413 - DNA, 539 bp, Homo sapiens
aacacacacacacacacacacacacacacacacacacctctaaactggggcctaagccaatgcagcacttacaaaacatttatgctgggtgcagtggctcaagtctataatcgcatctatgcaggaggctgacgctagaaaattgcttgagcccaagagttagcccacgcaacgtagcaagacaccatgtctctaaaaaataataataaaattgtcaccacgcacggtggctcatgcttgtaaccccaacactttgggaggctgacgcatgtggatcacctgatgtcaagagttcgataccagcctggccaacatggtaaaatttctttactaaagaatttctttagtaaagaatttcataaagaatttctttagtaaagaatttcataaagaatttctttactaaagaatttagtaaagatttctgtactaaattctttactaaagaatttcaacatggagaaatttctttactaaaaatacaaaaactagctgggtgtggtggcacacatctgtaatcccatctactctggaagctg

SEQ ID NO: 414 - DNA, 580 bp, Homo sapiens
ggggttaaatatactgtgaaaataaaatataaatataacacaaatataatatgctttaatttgttctgttaaatatactgtaaaataaaatataaatataacaatatataagtatactgtaaaataaaaatattctatgaaatgaagagatagattttgcagtattatttggccatgaaagtcaatgcatatgaaacaatatcattctattattttaacataggctaagaagaaatgtgtttcatcttgtaaaaaatttaggtgtatctgagcagacaaaaagtcttctggctcacacaggcttctggataggaaaccatgtcatgattctctcttcgttagcttctgtcttataaataaaggaatttgataggctgtctggaaaaagattgctgttttaaattggcctctggtcttctatgttgaaaataaaatttaaaacttctgttatcttgtaaagtttggaagcagtttaatgccaatgaatgtcttttgatgatctaatttatatgtaatagggtctttgtttcctgtttccacttcttatttcgaatgttaaaatgatagtctggtttcaatt

SEQ ID NO: 415 - DNA, 261 bp, Homo sapiens
gcactgtcttttgttgaaaccaacaaaggtcattttcagatatgcaaaaagtttaaaaatacatcactcatttgtcttcactgaaatactgattttagtcttcccaaattagtttatatatttaacccaaatgccagtgctttgtttttttttttttttttttttttgggttttgggatttttccctttaaaaaaacttttttaaaagttggccgggaaaaattttcaggggaaaaaacctaaaaaagttgggcaaaaacc

SEQ ID NO: 416 - DNA, 561 bp, Homo sapiens
  misc_feature 481: n = A,T,C or G
gggaattagaacctaggtcccctgggctgatctcccatgtccattcccttctgctgtttgcgcaggtctaagacaatcacctcttccctcctcccacctcggtcttatctgtgacctcctactacctgaaatttgtaaactattatatacttttgttacaggaactgggtcctgctcaagaccccaagagagggttcttggatctcggacaagaaagaattcagggggagtccataaagtgaagtgaaagcaagtttattaagaaagtaaaggaataagagaatggttactccatagacggagcagccctgagggctgctggttgccatttttatggttatgtcatgattacgtgctaaacaaggggtggattgttcatgcctcccctttttaaaccgtatagggtaacttcctaacattgccatgccgtttgtaaactgtcatagcgctggtgggagtgtagcagtgaggatgaacaganatcactcttgtggccatcttggttttggtgggttttagctggcttctttattgcaacctgttttgtcatcaagatcttta

SEQ ID NO: 417 - DNA, 517 bp, Homo sapiens
caggccctcggccagcaccaaagtgactgtccccctcaccttgagggcactctggctcctgctagtttgtcctggacctacactgtcctgggcgggctcagggatccattcctccctgctcaagggcccctccttgactgcctgacattgctctgtctcctatattccagggttagcatttaagctttggccttacttccaaaagcaccttgaccagttccttatgcctgagagatggggccaggtagggtgagggaaatcgtcacttctatgaaagattgtcagaaagatagaagccagcacctttccttagttcccccatttttgtttgaaagttgttctggccaggtgcagtggctcacacctgtaatgccagcactttgggaggctgaggtgggcagatcacttgaagccaggagttcgagaccagccaggccaacatggcaaaatccggtctccactaaaaataaaaaaattagccaggcgtggtggcatgtgcctataatcccagctactc

SEQ ID NO: 418 - DNA, 507 bp, Homo sapiens
cagaaggggcaccctttaaattgccctgttatgcaagtgagattaaataaaatgcttagttaaaaagtcatagcatggttggtaatttctgcctatttgcttttagggattacatgtaaatcctccatttattgctgttaacacttggctgagaaaagtaaatttatccctagaggggtttaaaggcttcgttttgtaactcccatgtaaaaagggttagagtaaatctattgtgtaattttacatggcatttatattgagaaatggatttggcaaggcaacagttaggtcttacttcagacttcattggtcttgaaatagattcatggtaacagtaaatatttttcataatatttgaacttttgaagttgcattttgcctgacttacaatttgtgtcaaaaattttaatcagttcagtaatggcacggctaagcttgcagtactagtttcctgtatccttttaaagcctaaaatgcggccgggcgcggtggctcacgcctgtaatc

SEQ ID NO: 419 - DNA, 588 bp, Homo sapiens
  misc_feature 185: n = A,T,C or G
ggagccactcctggggcagggattattctgcaactgtgctgcaaaggtaaacaacctgggctctcttctccagaactcatttccaacacttgaagagacaagtaagaaacttcaagtcagtgtggagagtgctgcaagggccagtactggacatgatgggagacactggaaagtcccaaacctantttatggtgttaggggacttcctggaatcggggacatctaagctgagccctaaagtaggagacagtcagatgggagagagtaaagaagaagacatttcaggccaaatgcctgaataccataccctggagtggtcaggttggttctctggtgggaacacgaagattctcctgatcttctcctccctactctcaacactctcaacattcgtagtttttacctccactaaatactctttcctatattatagtgatgttacccctttatctactggaaacttctgaagagaagagactggtcttatttttgaatctcctaaagtatccagcacagggctcagcacacggttaatgctttaaaaatattttttgataagaaatctcaggcctaagaatccctatcatg

SEQ ID NO: 420 - DNA, 116 bp, Homo sapiens
ctggcttactgcctatgggactttcacagaatggaacactgggaaatatatacggcaactgggcatggcggttcatgcctgtaaccccaacactttgtgtttttttttttttgaaa

SEQ ID NO: 421 - DNA, 438 bp, Homo sapiens
ggccctaagtgtaaagctcttcccaacaaagtcatgtgcatcaggtaatatgctccactttctcttcgagatgttcctgagaaccccctgtcttcttgccataacttggacatttcctggattctgaatcatattttcctcttgcttggttttctcttcttgatggatcctgtcctttattatcctcctgagctcgaatatctaaaatgtctttatttctactggaatattatcaaatatatatctggtctttgtctctgccttctgatatacaactcctaaaatccttgggatctctaaagtgatgtctttttgtatactaatactatgactgatggcggacagctcctatgtagcttcacgatagggactggacatctgaaagaccatggcatgattagaggggttgaaactttcaccccaccccccaaactccca

SEQ ID NO: 422 - DNA, 509 bp, Homo sapiens
cagaagctggacaaagtccttgggcagccatcaccatggtgacgagctggagagagctggcccagaggagaaggcagatgtctcagtctatctcccccaccccttctacccctctgtcctgtcttcctagctgcctctttccctctgctgtgctctccctgtgtccctaactagccctcttaggtcccctttcacttgttcccatctttttctgaaaaggggcagtagaaatgaacatgacttatcaaatttggaaagctggtaatagttttatacacacatgcacacacacacacacacacacatattcttcatctcctctcatcttttcctccctgtctctgtccctgcctatttctctggactgactgccctccctcttcttcatttctcacgctcttcattctctttcctcttcccagatctgtttcaggctatcgcctcctccctttgacaagacaggagtgatctgagctcccctcttgccatctgcaggaatgagatgcctg

SEQ ID NO: 423 - DNA, 509 bp, Homo sapiens
acttgtttctagtagatctacccttaaagaatagcgtaaagggaacttgctccaccaggaaagaaaatggtaaaagcccaaagctgagattttcagagcagggagaacaggatgagtaaaaatagaagtaaacatactagactattctttatctcatgagcttctttcatcatatgaaagaaatggtgatgcagaagttataatgacatctgatggtgctggtcagtgcatgtggaagaaatacttaagataattgtattttaaaactggaggggatacagagatctaaatggaggtaaggtctctacacctcactggaagtggtaaaacattgacaccagtaagctgtgataagttacctatgtgtatggcaatacttagaacaacccctaaggaaactgtgtacaaagcagtgtactcagaaacattataagtaaatcaaaatgcaactctaagaaatgttcaaggccagttgcagtgactcatgcctgtaatcccagtgctctggg

SEQ ID NO: 424 - DNA, 505 bp, Homo sapiens
gacgccaaaaaagaaagcaaaaagaggtaaaaaatttgttgtctaatgctccaaaatgaaatcagaaactgatctaaaatctgaattagccaatgcaatatggattttgataactcaatcaaaataatgaaaaacagataatcttttcattatgaaaaaggaaatgaagataacagatacaatgacatccaactacaagatggttttggacacatttttaacaaccaaaccagtgccaaaccaaaatgaaagaaatgtctttatttttgaaatgtgtgttgctaaaggtcaaaatagttggtgctctggttccattgggctgctatgacaaaatatcataaattgggtggcttataaacagcagaaatttatttatcacagttctggtgaatgaaaagaagtccgagatcaaggcacaggtaggtttaaggtctagtgaaagtcaatttcataggtgttcatagagggtgccttcttttatgttctttcatggtagaagggctgt

SEQ ID NO: 425 - DNA, 639 bp, Homo sapiens
gtgaggcaatgcctcgccctgcttcggctctcgcacggtgcgcgctcccactgacctgcgcccactgtctggcactccctagtgagatgaacccggtacctcagatggaaatgctgaaatcacccgtcttctgcgtcgctcaagctgggagctgtacaccggagctgttcctattcggccatcttgtctcctccccccaggtaacataaatattaataacatgatttcatttcaagtaaataaccttgtattttgttcactttaaaaatttgtatctgtgggatgtgtctgtggttagccagacagcagctagagctgagaatgtgaccctatcaagaagaaatatagttatttctgaactatatctgctattactgtgtccatccagttttactccatgatgatggtgtcttggagtaagaggacagtgactgctactggcatagactcagagttccaaatggaagaaaaggaagaggacaagactgtgggagattatgcaagtagctgatagtgatagcaaacacaaggatgttgaatgattaaagagttcaaacttgttacagccatttacttgacatattttggtaatttgaaaatccattctccattctatttttaatcactgaattactggaa

SEQ ID NO: 426 - DNA, 551 bp, Homo sapiens
agaaggggcacatgttagtgtctacagagtgccacgtgggtagtgctaggtcttccaggaggctcagccactgatgactttaaggcatgcaggtctccagcatggctgcaggaaaactaagagaacttgtttctagtagatctacccttaaagaatagctaaaggaacttctccaccagaaagaaaatggtaaaagcccaaagctgagattttcagagcagggagaacaggatgagtaaaaatagaagtaaacatactagactattctttatctcatgagcttctttcatcatatgaaagaaatggtgatgcagaagttataatgacatctgatggtgctggtcagtgcatgtggaagaaatacttaagataattgtattttaaaactggaggggatacagagatctaaatggaggtaaggtctctacacctcactggaagtggtaaaacattgacaccagtaagctgtgataagttacctatgtgtatggcaatacttagaacaacccctaaggaaactgtgtacaaagcagtgtactcagaaacattat

SEQ ID NO: 427 - DNA, 529 bp, Homo sapiens
  misc_feature 285, 433: n = A,T,C or G
agaagggatatttttaaatgtgaaagcaggcaatattatcttgtaggtattgtattatattacaagagccaaagcatgctgattcccaatttcatccagtatgacttgtcttagaaaaagaaataaaaatgcagatccatttattcacttattaactgagtacatttcctgaatccatgtgcacgttgggtgataggaagctgaggccctgctggctaaagatgtaagataacagagcctaaaactggcacaccagctggaaattaggagggcaagtttccctanaaatgggagaaccacagataggatgaaccccaaaatctgaatataaactctttccaaatacttggctgaccaccaacttatgcaaacataagggagacttcagtaggccagcctgaaacaaagcaactgcagaagctgaaaaatttanggatttgtcagttgctgcatatcacaggaaatcagagcttgtagtttgagtccaggtcagctaacttcttaccagaacaataagccaatgatcacc

SEQ ID NO: 428 - DNA, 557 bp, Homo sapiens
  misc_feature 149: n = A,T,C or G
ggagggtgttggcctaaagcccgcaacagggccagagcactgcctggggcactttctgctacgtaggaagccctgctgggggtgaggagatgtgctcagtgactggatcagggaacaggtggctctgctgggcacacacagcctctcangagcccccgacatcctgaccacatggccatccctgcttgcctctgaggctcttctcacagcctggtatactctctgaggccccctggtccttctgccaggctatggcctgggttttttttaaattcctgtgggctcaaagcccacttcttagcagcccacatattcagccaaatcattaaaatacatctgcaatagaggattcttagggcagtgaaactactctgtctgataactatgatggtggatccatgtcattacacatttgcccaagcccacagaatgtacaccaagagtgaatcgtaatgccagctattgactttgggtgataatggagtgtcaatataggtttatcaattaacaaatgtaccactcggaggccaagcgcagtggctcacgcctgtaatccc

SEQ ID NO: 429 - DNA, 636 bp, Homo sapiens
  misc_feature 166, 493, 526: n = A,T,C or G
ggacgctgcccagctggtctcaaacgcctgagcttcaagcattccacctgccttggcctccccagtgttgggattatagacgtgagccgctgcaccccgcccataggtgtggtcttaatgtgcaacagccttgaactcctgggctcaagcaatcctcctgcctcancctcccaagtagctgagactacaggtgtgtaccatagtgtctgacttgggttaagacttaaatgtaaaaaaaaccctgtaactagtataagaaaatataggtaaaaaaataacctcaaggtggagagggcctttctaaatataaaaccaaaggaagaggccaggcaccgtggctcatgcctgtaatcccagcactttgagaggctgagaagggcggataactcgaggctaggagtttgagaccagcctggccaacacagtgaaaccctgtctctactaaaaatacaaaagagtggccgggaacggtggctcccgcctgtaatcccancactttgagaggctgaggcgggcggatcatgangtcaggagattgagaccatcctggctaacatggtgaaaccccgtctctattaaaaatacaaaaaaaaattagccgggcatggaggcgggtgcctgtagtcccaactactt

SEQ ID NO: 430 - DNA, 536 bp, Homo sapiens
gtggtggcctcctcgctctgccctacatatgctaggcattctcttgcctctgagtctttgtaattgctgttccctctgcctgggttgctcttcccacatagttcatttccacactccttcaggtcttaatcgaacatcatttgcctctcagtgaggatttcctagtcaccctctcaccctaccaacctttttgtttttttccatagtacattgtcaccaacatgtcacatactttacttaccttggttattatcgtctcacacgttttatcacaatgcaggtatcttgaaaccaaggaattgtgtctgttttgttcactgctgaatccccaatgattggaacaattcctggcatataatagatgctcattaaagaagttttaggagaatgaatggatcaatcaataaacaactactaactggaaaaatataactgccagcatttcatatttgttcacaatgtccatgtgtataatggcattcacaacattgaaacagaggccaaagtactaaaagcatttaaaaggtccctggaaa

SEQ ID NO: 431 - DNA, 580 bp, Homo sapiens
gaaaaatctatcccattaagagcttgcattagaaaagaattaccttgaaattatgatgaaagcttccaacttgttattataaaaatgagaacaaattaattctgaagcaatcagaaagaagaaaataataaaggttaatgaagaaataaacaacattaaatggagaaaaattatatagctaagtaaattaaactaaatttagatctttgaagggatcaataaaattgttaaatctctggccagactatggagaaaataataggaaataaataatttacaaattttaagaatgacagaagtggctgggggtggtggctcatgcctgtgatcccagcactttgggaggccgaggcaggcggatcgtttgaggtcaggagttccagaccagcctggccaacatagtgaagccctgtctctactaaaaatacaaaaattagccgagcgtgatggcgcatgcctgtattcccagctactcgggaggctgaggcacaagaattgcttgaagctgggaggtggaatttgcagtgagtagagatgaagccactgcactcaagcccgggcgacagaacgggactctgtc

SEQ ID NO: 432 - DNA, 317 bp, Homo sapiens
cagaagggagataatttacccttaatacctcaatagtatctctgaagaacagagatattctcctgtgtaatctcttttttgtttttttttttttgaaacggatttttgcactctaccctgggcaacaaaaccaaaactgtctcaaaaccaaaccaaaccaaaaccaaccaaaaccctgtttgattctgcaggggttaataaggggtatggcggcctcctcactaatttgtaaactttcattacctggggcatggaaaattaccaggaaataatatccagtaaatatgtaaaaagttttcacattgacctgggcccgg

SEQ ID NO: 433 - DNA, 636 bp, Homo sapiens
  misc_feature 397: n = A,T,C or G
tgctgtgtcctattataagtgtgatgtattcctttcaagagccctatgaagtggacattattgtccttattttgcagataaggaaactgaggagacttggggtcacacagtaatcaaagttgagatataacccaaacttacacaaaagctcactaggctagtgccagcatctataggactaagagggaaaagagccgtatgagaagaggaaataggtataaaacagctacttaagtccattaattgtgaacatgcttgctttttatctaagtcttcctagaaatcaatgtatttttagtcctctattaagttgggcattaagaaccaactagaatgtacatgactgaagtagatgggtaatgaatataaattgtagccccagctaaaaaggacttanaatcccagcagtccagacaatatcctgtttggagtgacatctttaccacagaagctatttttcatgggtttcccagactccaaccctagatcagggatggagattgaaattgaaggaagactacagaccaggagatttaactatccagttggtcctcagcatcctgttcttactgactcccccatgcatcttgcttgaagtgtggactccaatatggaccatcagaacctaacctttta

SEQ ID NO: 434 - DNA, 582 bp, Homo sapiens
gggcttgaggggatggatacccaattttccatgatgtgattattgcgcattgcatggctgtaccaaaatatctcatgtaccccataattatatacacctactatgtacccacaaaaaatttttaaaaaggaatgaaataaaaacatttgagtttaagaaaaccacaaaaaaacaaagtagggaaagctcttcaaatactatgaaattgagaagacaactaaagaaaatattaataaagacaagaacataaataatttctttggcagaacataagccatcataatcagaagataaataagctgggaaaaatatttgtaactcatatcctagataacatactcattttccctgtatataaaaagtttctctaatgtgataaataaaaacacaataaaccagtaaaaaatgactactttgatatgaaggtatgaattcacaattcctagaaaatagaaatagctcttaaacatgtggaaagatgtgaaatcaaaatcataataagagaaatgtaaattaaaattactttgagttttattttactcacaatttcaaagaccaaaaagtttgagagtatactgtgtg

SEQ ID NO: 435 - DNA, 486 bp, Homo sapiens
gacttcaagtcataggacaaaattcaacattctcttccctcctccctttctatcttggattccagctctcataggggatcacttctagctctcttagctgtttcttctgatattttacctttgtatctcttgtattgcctgttctggtttgggctgctataacaaatactatagactgggtggcttaaacaaaagatgtttatttctcaattctggaggctgggaagtacaagatcaatgtgaggccaatttgggtcttggcaaagacctgcttcctagtttacagatggccaccttcttgctgcatctttgcatgaaagagagaggagagacagagagaaattgagtctctttctcttcttaaagtctcatcatggggctccaccctcgtgacctcctctaaatctgattaactgccaggcgcagtggctcacacctgtgatcccatcactttgggaggccgaggtgggtggattgctcaaggtc

SEQ ID NO: 436 - DNA, 594 bp, Homo sapiens
atcaaattaggtaaatagcagcatctttaagagatctcaacaagatagtgagaaggtactctaaaattctgggagtcatgcacatgctctccagagtctaatttaacaatatgtcaatgaattataaaaaggtgcatgctttttaacttttattgaaataaaacagtttaaaactttttattgaaacatatgtctggaaaagggctcaatgtataagcacaaactacatgagtgtagggcccagaattgagtgacagcacccagatgaagatgagttattatttccagtacctcagagtcctccccatgggctccccagaaactgctgttccccgagagtcaccacaccgctgactgccataaacttaaactggctttgcctgtttttgtacttcatatgaaaggaatattaatgtatgctccattttgtgtctggctgtttttgttcaatataatctttgagattcacctcgtactttatggggatgaggagatcatgtgtttacacagcagaatcatattacattatgtgccaagggctttgatggtgtgctcacagggatgcataccaatctgtatgctcttcaatgtgtg

SEQ ID NO: 437 - DNA, 503 bp, Homo sapiens
  misc_feature 319: n = A,T,C or G
gttccttatatcttggcacataaaatccaatacatagcaaaaactcatttacaatcatatgatgtcaaagaaaatacacttgtccctctgtatccttggagactggttccaggagcccctgaggacaccaaaatccacagatgctgagatcatcctggactgtacctgactggcaatcaggaggcctagactgtagccaagctctccccctggacggtttagccaattaagcatcagtctccttggtctcgaataaaaagatttaaatcatctaagtttaaaaatctctcttagcgccaggcattgtggctcactctancactttgggaggccgaggcaggcagatcacccgaggtcgagagtttgagaccagcctgaccaacacggagaaacctgttgacagggaaaacctgttgacaggaaagacagggaaaaaccctgtctttactaaaaacacaaaattagccaggcgtggtgacacatgccagtaatcccagctactc

SEQ ID NO: 438 - DNA, 517 bp, Homo sapiens
  misc_feature 301, 447: n = A,T,C or G
gggtacttggcctttcccacccataattctgggaaaaccctctctctgggagttaatcatcctgcagggagtttctgctcctaagctctctgctgccctctgctgggaggcagagaccttttcccttgctgcaccatggagctctagttctttgagtagcaagcacctgccaagatactccacccttcccacattcattctttcctttcccattcagcaaatacttattgaggatatcctgtataccaagaactacaggccctgggatacaaggtgaataaacttggctcctatctcttangacctcactaaggcgaaagacagaagggttaataacaattagaatatggcttgagaaaggccagacgagagaaagcagaagataaagggagactaggagaaaagaaacgttagcaatgctcacaggagagaggaagccttcactanggttttggcagctgagctgagttttaagggatgggcaggagtaggcaaattgctggagtcttggatttat

SEQ ID NO: 439 - DNA, 538 bp, Homo sapiens
  misc_feature 384, 401: n = A,T,C or G
gtactgccctcttactacttagtgtaggtgtgttaatttacaaagtacagccctaaatttgagagttaactacaactcttaaaaaattattggctctgaaatggaatttacccagggattatgtgagcaactggttgatgtattaagcatgggccacctgcctacctgattttccataggcaatccaagtctacgccaaagcagtcaaaaagacatctaaatatcctctgcctagggcatattaaaaagaatagaacataataaagagttgcacataataaagagttgataaagataaacatgtaactagcatacacgtactcataaaaaggctaattataggaggacattggcgggtgcggtggctcatgcctgtaatcccancactttgggaggctgangcgggtggaacacgaaatcaggagatcaagaccatcctagctaacacggtaaaaccccgtctctactaaaaataaatacattagctgggcgtggtggcatgtgcctgtagtcccagctacttgggaggctgaggcag

SEQ ID NO: 440 - DNA, 604 bp, Homo sapiens
gcagacttttaaaaaatccaaataagtttactacatatatatttaaaacagattctgaagagttagagtcaaacgataaaagagagaaaatgaggcaaaaaccaaagaaaccttgatttgatctttgaaaaaaatgcgattttaaaacagaaaacattaataggtatcataatgtaaggtccctacattatgataaaatgttcaatttacaataattcactgataacatagcctcaagatatatgaagcaaaaatatatacatttatgagaaattatcaaatccaccatcatggtgagaatatttaacatacctatttctgtaattggcaactcaagcaaataaaaagttaaagatatgtaagattgggttgtataattaaaaccggtgatacacagaacatcatgtaattacagactacacattctttttacgcacacaaagaaaacttgctgggttttaaagctagcttcagcgaatttaaaagaattggcactatgcaatctctgactacaatataaattaggcaactacaactacaagataacaaaagaaacttcatatggccaaatggaatttaaaaggtacatttataaaaaattcat

SEQ ID NO: 441 - DNA, 557 bp, Homo sapiens
  misc_feature 83, 186: n = A,T,C or G
agaagggataggtgtgaaccagcgtgcccggcccaaagacactttttccaatcacagtagcgttcacagtgtccagagattangccctgttatctttgggggccattcttcaacctgttgttactcctgctttcaaaccatggtgtgtggctgtgtcctatcctgtgtccattcctgctgccctantgttgtggaagttccaggggagagatgtgttttcacttggtagccccctctgcagggactgttccttcaacagttgtccagtctgggtgcggtagctcacgcctgtaatcccagcactttgggaggccaaggtgggtggattgcttgaagtcaggagttcaagaccagcctgaccaacatggtgaaaccctgtatctactaaaaatactgaaaagaaaaaaaaaagcttgcgcggtggctcacacctgtaatcccagcactcgggattacacctgtaatccgactcgggaggcggatcacccgaggtcgggagttcaagaccagcctcacccacaggagaaaccgtgtctctactaaaaatatgaaataac

SEQ ID NO: 442 - DNA, 505 bp, Homo sapiens
  misc_feature 160: n = A,T,C or G
gctacttagtgagacattttaaacgcaaaagttacagatacctaaacaaagcaactgttcagtgacagggagctgtttgaaccaactgccacacaagggccaccacacagccaccaccagccatgccacagactctgtactcacacggggaaaggcttangaagagttactaaaaggaaaaatcagccacaatacagcatatgtagcaggaaggcactgccgtttacatttaaccaagatggaaaaggaaagaagatgaaagggacagagggaatggacaaagagagggaggaaagaaaggaaagaatgttttgaaaacaatggcctggcagtggttacctctggggcagcattacaggtgacatgatttgtgtgtgtgtgcgtttctaaatttcccaaatgttctataatgaacatgtatgaccaatacaaccaaagaaaagagtattttttaattaaaaaaaaaaaaaaacttgataaagggctccgtgtccattaatggcca

SEQ ID NO: 443 - DNA, 560 bp, Homo sapiens
  misc_feature 421, 522: n = A,T,C or G
ggcataaagctgggagatgagagctggccacagtgcagtgggggacagaagtagccagcatgcctaaagcagggagggctgggcagagggaatgaagggtccatggccccagccggggttctgtgttaaccaagtagcagattatatttaaaaatcaaatttgctgttgctgcaaataccaaatgtacaattaaaaaatcaccaaggcgctgcagcaggttcattctgttaaacaataccagcatcctctcctctgttggtggtattttcccttctcagccacaaactacaaacaccctactcactattccataccttctgaggattctagagaagagagttgctcatccctttcagtcctgatagcttctgtttaagaagaaaaatcaccgggcatggtggctcatgcctgtaatcccancactttgggaggccaaggtgggcagatcacaaggtcaggagtttgagttaagcccagccaacatggtgaaacctcatccctactaaaaatacaaaaattanctgggcgtggtggcggatgcctgtaatcccagctgctt

SEQ ID NO: 444 - DNA, 517 bp, Homo sapiens
gaattgggtgaggcgggcaaatcacctgaggtcagcagtttgagactagcctggcaaacatgatgaaaccctgtctctactaaaaatacaaaaaaaaaaaaattacccaggcgtgggggggcacacctgtagtcctacctactggggaggctgaggcaggaaaattgcttgaacccaggaggtggaggttgcagtaagccaaaatcacaccactgcactccaacctggacaacagagcgagactccatctcaaaaaaaaaaaaaaatggggtggcctaaaaaaaaaggtattgggttttgtgggaaagggccaaactgatttgaaaggaaaacacattttttgtccgggaaaaaggattttattatccttagaattgtcttccaaaactaaaacctggattgggacgtttttaaaaaacaaaaacaaaaaaggcagacccgggatttacctaaaaaaaggatgttttttttttttttttaccccccttaaaaaaatggggggggctttattttaaaa

SEQ ID NO: 445 - DNA, 557 bp, Homo sapiens
aaagccagataatctacaaaatcaaaaatttctttgaccctattcaagagctgaggtcacaagacaaagggggctgaatttcaaagagtaacacgtgcctccatggagagcagacatatgaactgtttcacctttatcaagcatgggaggaagaaacagcccccatagaagagggtaacaataaatcagctgaatttattacaaatttctaaaggccaagtgtggaatagcacaccaatttaacataatgacaagtccagaaatcagagcacacacttcctcagaagtttccctttgggtactcacaagaaagcataggggttagaccaaggcccaaaggagctgttctcaatggcacagttttatgagacgtgtcagctgctgatgcaagatatacccaaacaccacccacttcctaaaactcttctctcacacattaaaaagactttcaaccacaaaagaaagggcatcgaaacttttgatatctaaggtcacttgtggagaagtaaaagcagaaattctgccttcccaaggttagaaaaatctctctttatctc

SEQ ID NO: 446 - DNA, 488 bp, Homo sapiens
gtgaatgatttacattcagaaaaacatagctctgggccgggtgcggtggctcacgcctgcaatcccagcactttgggaggccgaggcgggcggatcatgaggtcgggagatcgagaccatcctggctaacgcggtgaaaccccgactctgctaaaaatacaaaaacaaaattagccgggcgttgtggcaggcacctgtagtcccagctgttctggaggctgaggcaggaaaatggcgtgggcccgggaggcggagcttgcagtgagctgagatcctgccactgcactccagcctgggcgacagagcaagactctgtctcaaaaaagagaaaatacatagttcttccggtttgaatagccacttggcactgatctactggaatccaaagaaattaatagtaaagataataatagttataattaaacaccatgtttgtgcttagaagtaagataaattggccgggtgcggtggctcatgcctgtaatccc

SEQ ID NO: 447 - DNA, 385 bp, Homo sapiens
  misc_feature 152, 168: n = A,T,C or G
ggtctgtcgtccaggttctggtgacagagaagctgggtgcctctgagcaccagcctgaagcagggaagtgcaaatgggcttccctcagaccagcgggaagcccacagggaagaagctgcagacttgccttgcggaagtctcgcctttcctantggagactgagctganccatccggatggggtgggggtaggcaaaggagtgacccctgatttgtctttgaccattaagagctgcaggagatgcagggggccctcccgactttgggctttcaacacaactttaaagcagttctgtctaatgagtttgcagaaccagaagaaaccaggagccagaatgtcagaaagaaaaaaggggccaggcgtggtggctcacgcctgtaatccc

SEQ ID NO: 448 - DNA, 552 bp, Homo sapiens
  misc_feature 451, 474: n = A,T,C or G
gaggcgtgggtcactgcgcccggccaagctgattcttgagtattcagaatatctgtcctcccctgatcctgccaggcaggtggtgggaaaggcccctgttcctggcactgagtccccatgagggtaaagagggcaggcaactgccagctgttctgagcccatcttgcctggggaagctctggacagtggtaagtgacagtgcagtgttgtcaaaaatgtcgcttttatttcagcttgaagaacttcagaaaaagcaacatgaagcaaagttggcagtgactcccctgaaggtaatatgttcataaaatcaacatgaaatgcctctttcaaaacaaaagaaagtttagtagttttcctgttagacatgtaatccacctctattgtataaaagtctgggtagggccaggcacggtggctcacacctgtaatcccagcactttgggaggctgangcgggtggattgcttgagctcangagtttgagaccggcctgggcaacatggccaaatcccatacaggcgtgatggcatgcgtctatagtcccagttacttg

SEQ ID NO: 449 - DNA, 557 bp, Homo sapiens
agtataaactacctccctattcctcttctaaaacagaggtcctcagtccccaggccgtggacctgtacctgtacgtggcctgttaggaactgggaccgaacaacaggaggtgtgcggtgggccagaaagcattatcttctgtgttccgcctccttaagaacagcagcagcattagattgtcataggagtgcaaaccctattgtgaactgcacaagaaaaggatcttctggttgtgcactccttatgagaattaaatgcccgccccctccatgctcccatggaaaaactgtcttccactaaacctgtccctgttgccaaaaaggttggggaccacggctctaaaatattagatgcagacaactcagatgcaataaatatacatttggaaaatccttcatcataataaggttttctaaagagtttggttaggttgaaagtccagttctgctcctggaccatatgaaaaggtcagacatctctgatagcctgaaatctcaaacatctccattacttatactcaatcccactgcccctaatcattctttgcctcattcatc

SEQ ID NO: 450 - DNA, 532 bp, Homo sapiens
ggatgcctgaatctggatgttttggaagaaagacaggataggatgagttagaaagttccagagtaggaatgttttcaggggaggggaaaactgagtcaggtactgacatgaaggccactggatgcttcagagtctagaggggataaaacagtatagcttacaagccaggaaagggcacagaacaggagagatgggggcacagcttgacaggcaacacctgttttccaattttgtccagaagtagcttttctctaagccagacttttcttcagagctcttctgtgtctccttaccaaagccgatgataactaccatgaccagctttgtttttctacagtaggtggaataaattataccctatcaatgttatctttataccaggtgaagagagtttgtgtcatctacaaccctattttgataaaggctcttgcacgtttgtctccctctggttcaattaattgcatacacatttaacaaatatttatggtactccttctacatgccaagtgctgttcttaacactaaaaacaca

SEQ ID NO: 451 - DNA, 541 bp, Homo sapiens
  misc_feature 430: n = A,T,C or G
gggataatgagtttatgtgatgggaaagcctgacgttggagtgagaagcctgctcctatcccagcttcacccgtcactagctgcagggctttacaactggttctctcacctctccaagtctcagtaacctcatctttacaacaggttagtaataagtgtcttgaggcagggttgtgacagaaatccaatcagagagcagtgctgaacaccgaggaagctcccagtcaacaacagtgttgttaatatcacattaacatcttaacatcttagaacctgaataaaccttagaaaacagcaaatgcagcttttccagttaaaatacatgggacagcaaggcccagatgtgaagcaatttgcgcctggtctgtgccacaggatcttgttattatgtaatgaagccaccagagcaagaagtttccaggagccctancacagccaccaccctcttgggaccaggcccttccacttttcacttttcactaagcatagtaaaaagagtcttacgtgggggccgggcgcagtggctcacgcctgtaatccc

SEQ ID NO: 452 - DNA, 509 bp, Homo sapiens
aaattagaaaaggggtgatataatttgactctgtgtcaccacccaaatctcatcttgaattgtaatccccgtaatttctcacctggcaagagtgggaccaggtggagacaattggatcatgggggcagttttccccatgctcttctcgtgataatgattgagtctcatgggatctgatgattctataagtgtctggcttttctcctacttgcactcactccatcctgccaccctgcgaggaaggtgcctgcttcttctttgccttccgccgtgagtgtgagtctcctgaggcctccccagcaatgtggaactgatacgtcatggaacagagggcaacctgcctcctggaaatgtggagtgtctagggagtcacagctgagatcttccttggattaaaggctgcgggtgtcacaaacaggtaggaatattcaagtggtaatcttgaagaattactggaagctgagggtagtctaggatgtgaatgaaaacctcctgtgggcctcagtctc

SEQ ID NO: 453 - DNA, 551 bp, Homo sapiens
ggccgggcgcggtggcgcgtgcctgtagtctcagcctcctgaatacctgtgactgtaggtgtgtaccaccactcccaggtaatttttaaagtttctgtagggacggggtctccctgtgttgcccaggctggacttgcacccctgagctcaagtgatcctcctgcctcagcctcctaaagtgctgagattaaaggcatgagctactgtgcccggccattgtaatattctttcaacttttatgatgacttgaatattttcaaaacaaaaaaattgggaaaaactttatagtcacagggaattaaaaaaataattttaagaagcatatttcggtattataagaaaggatttactaggactagctgggcgtgggcggtggctcatgcctgtaatcccagcactttgggaggccaaggtgggtggaacttgaggtcgggagtttgagaccagtctggccaacatggcggaaaccccgtctctactaaaaatacaaaattagctgggtgtggtggtgcatgcctgtagtcccagctactcgggaggctgaggcattg

SEQ ID NO: 454 - DNA, 483 bp, Homo sapiens
  misc_feature 423: n = A,T,C or G
gaaggggttacacacacgtacacatatagacacacacatacacagacatatacgcatgtgtactatccagacacacacatacacatatgcacacgtacacacatatacatacacacatatacacatgcacatacacacgtgtacacatgcagacacacagacacatatacacacataccaacacacacatgcacacatgcacacatatatgcacacacatatagacacacacagccacacatacacatacacatagatacagacacacatacagactcatacgcaaaaaaatacatagtcacacacacatgcacacatataaacacacctacacacacagacacatacccagacatacatatacacacacaagggaaagacaaaagggattaaagaattagggatttagggaaacagaagctntgatactctgtatcaaaaatgtttggctgggcgtggcggctcaagcctgtaatcccagca

SEQ ID NO: 455 - DNA, 327 bp, Homo sapiens
ctacggctgcgaggaagagacagaggggggcttagtgcagtgacacaattacagctgattgcagccttgaccttcccagctcaagtgatcctcctacctcagcctcccaagtagttaggaccacaggtgtgcacctcatatccagataatttttttcaatttttttttgtagaggtggggggtctccctatgttgcccaggcagatctcagactcctgggctcaagcgatcctcacacctcagcgtcccagagtgctgggattacagttgtgagccactgtgcctggccttttttttttttaaaccttttggttaaacttctttttt

SEQ ID NO: 456 - DNA, 338 bp, Homo sapiens
acagaagggacaagatgaccctttaatgggtagcaagatatgtaacacagtggacataacagtctacttttcttttttctttttgagagtcttggctcttgttgcccaggctcggagtgccacggagcaggggggcatcacggctgccccccccccccccgcaaatttttttggaggcttaaaaaaaagggggggtctcccctggggggcagggggggccaaaacccccggcccgggggggccccccccccccgggccccccaaaggggggggaataaagggaaaaaccccgggcccggggccaccccccgaccaatttttttttggggggggtttgg

SEQ ID NO: 457 - DNA, 470 bp, Homo sapiens
ggggagtgcagtggcgggatctcggctcactgcaagctccgcctcccgggttcacgccattctcctgcctcagcctcccaagtagctgggactacaggcgcccgccactacgcccggctaatttttgtatttttagtagagacggggtttcaccgtttttagccgggatggtctcgatctcctgacctcgtgatccacccgcctcggcctcccaaagtgctgggatcacaggcgtgagccaccgcgcccggccaggagcaggtattttcaatattgctttagttgcatggtatatcagagcagctgtgaggtacattgttgatggaagtaataattttgcctcctctgtgtgtgtgtgtgtgtgtgtgtgtgtgtgtgtgtcacataattttcctgaaagccatatttgtatggcacattatagcttacagagaaccttcatgtctgttacacaggtgattctcacccca

SEQ ID NO: 458 - DNA, 505 bp, Homo sapiens
gatcacttgaggtcaggagttcaagaccagcctggctaacatggtgaaaccccatctttactaaaaataccaaaaattagccaggcgtggtggcacatgcctataatcccagctattcgggaggctgaggcaagagaatggcttgaacccaggagacagaggttgcagtgagccaagatcgtgccattgcactccagcttgggcaacaagagcaaaactccgtctccaattaagaaaaagaaatgaaatgttatgatgttcatggacacaggttcttgaaaccaagttctacctctgttttgcagtaagactctcccttgatgaagggataagagggaggttggggggtggacgcagtggctcacgcctgtaataccagcactttgggaggccgaggcgggcggatcacgagggcaggagatcgaggccatcctggctaacacagggaaacccgtctctactaaaaatacaaaaaaattagccaggcgtaatggcaggcgcctgt

SEQ ID NO: 459 - DNA, 505 bp, Homo sapiens
cgacagagggtacagaccactctgggagcctaatactcctttgatactgtctctgtggggatagtaggtttagagttgacatcagactgttggctgaggtaacttttttctactcagagaaagaaaagttcttgcctgggcacggtggctcacacctgtaatctaagcactttgggcagccaaggtgagagtattgcttaagcccaggagttcaagaccagcctagtcaacatggtgatacctcgtgtctacaaaaaaataaaaaagtaatcctggcactttgggaggctgaggcaggtggatcacgaggtcaggagattgagaccatcctggccaacttggtgaaatcctgtctctactaaaaacaaaaaaattagctgcgcatggtggcacgtgcctgtagtcccagctactcaggaggctgaggcaggggaatcgcttgaacctgggaggtggaggttgcagtgagctgagattgcgtcactgcactccagcctggtgacag

SEQ ID NO: 460 - DNA, 350 bp, Homo sapiens
gaagggtacataatcataacataatttagtctactgctattcactcatgaaatataactctgtgctagatacatccactttctaaaagattatactcacctccgcctcccaagttccagtaattctcctgcttcagtctcttgagtagctgggattacaggtgcctaccaccacgcctggctaattttttgtatttttagtagagacagggtttctccatattggccaggctagtctcaaactcctgacctcaggtgaccaacccacctgagcctcctaaagtgctgggattacaggtgtgaaccactgtactcggcttgtaaaataaattaatttcactcatctcatgg

SEQ ID NO: 461 - DNA, 545 bp, Homo sapiens
acagagggatggtcaagccactacactctagtctgggcgacagagtgagatgttgtctctaacaacaacaacaaagcccagttcgggtggtaaaggtggcatttcatagcgatgggatggtgcagggtgatcctggcagggcaggtgatgagagtgtggaggcagagcctgggaaacctccatgtcaatatgatcacagaaacaaggagcgctccatcgcaactggggcaaagtagaaaacgcactgagggactgacctgatgaaggtggagggtgcgaaatgcaatccaaagtaaagaagagatgagggtgcagaaaattatgggcaagaaacaatgctctcaggttctagatttgtggtcttaattgaatcacaatttggagaggcttattttgtttttatttttttgagatagtctcgctctgtcgccttggctagagtgcaatggtgccatctaagctcactgctacctctgcctccctggttcaagcaattctcctgcctcagccccctgagtagctgggattacaggcatgcatcacca

SEQ ID NO: 462 - DNA, 281 bp, Homo sapiens
ggggtgcctaatcaaaatggaatggaagtttgtagtatgtactgttgaaaaccaatgggagaggatggtgggagggttaggttgaaacatggtattccagttattattgctgtataacaaagtaccccagaatttagcagcttaaaacacccatactgtggtcaggctggtcttgaacttccgacctcaggtgatccgtccgcctcggcctcccaaaatgctaggatacagggcatgagccaccattcccggcccacaccatcattttgattgtgctcttt

SEQ ID NO: 463 - DNA, 532 bp, Homo sapiens
acagaggggtttctgcagatgtggagataggctcagatgttaaataacttacccaatattgcactggtgggaagagccagagataggtctggaacccaggcctgcggggtctctggatctgagcttcttccatcctcgtgctacagcagcagtctggagacactccataatggtgactcccccaaacagcttgcagaggtttaaggaaggagtctgtttaagaaaagtgggtgcatatgtgtgtaaatgtgtgtgcatatttgagtgtgtgtacgtgtgtgtgtgaatgtgtgtcagtgtgaaggagccaagggaaagaggtcaaatgtcttacaaagatagagtcgggtctgagagggagagggttaatagtgtagatggatgtattagataggcttgctaaggaggagggacacaaattcctagaagggaggagtggagaagtcaagttggaaggatcggcagggaaatacatgcgggtggaaagaagtcacatttgatgacttgggtcttcttggtttatgtgaaggct

SEQ ID NO: 464 - DNA, 579 bp, Homo sapiens
ggtgcccacccagtttaagggtgggtctgcctttcccagtccactgactcaaatgttaatctcctttggtaaaaccctcacagacacacccaggaacaatactttgcatccttcaatccaatcaagttgacactcaatattgaccatcacacatgcatacaatgaaggaatgtaacaggtttttcagcagcagataagactgaagagcaaaaattaaagttagaagcttgagagaaaaagcttctttagattattacagcatatttcataattagataacaaatcaataaagtaggtgatgatctagatactgaatgtccacaaaattgtaccaccaaatctctcatgaatatgataaaatacttttaattttattttccatcacaaaaagatctaacacaggcaattcgttccttttgtaaagttaaataacaaatttgactatcagcttatgggataaattatcagaactggttacctatgaaagactaagtataaattttgaaactgcagttatcacttgtttgattttagataaaaataaaaaattaataattcgagctcgtttaaaattttttt

SEQ ID NO: 465 - DNA, 532 bp, Homo sapiens
gtctattttggggtgcacacacacagggacattaccatatagctctgctcctcagacctaggtgatgtgactctcctgtctgttacctcctcttagggggtattgtgatatattgctgggcccagaaccgaggtgatgtggccttttctcttgcctgggccctgcatacatggtgtacagtaacatatatctgggttgaacacataggtgatgtgactcttctgcataggtcttgccaacaggggtattatgacatacctttctattcgttgcctaggctatgtgactctccactcttatctgggcccttccaaaagaggggattgtgacatatcagtgaccctaccaccaaggtgatgtgactgttctcttttgcctgggtttgcatattttgggtattgtgacatatccctgggcccaacacttaggggataaaaggcttattcctctaccttatgcacagagaaacttgtgacgtttttctgcattcatcaccaaggagatgtgactctcctacctgcatcctgaccac

SEQ ID NO: 466 - DNA, 546 bp, Homo sapiens
ggcaagtacacatggactgttagttttctcttctacttcttaactgagaacataaagaattgtgaccatatgtgctacagtctgcatgacacttactgagaacatctgaatcacctaatagcactgactagtgtatttgttcaccttgtgaaattgtggttgactccaacataagcatatttaatagccagctatacatggggttccaatttttttctatatagcttaaatgagaccatacgcagtgttaagggttgaaggaagatatcagggcaggaaacctagtggataaagctcggataaaacacacaggtttcatggcctcccaattttactaaaataaaatttgtagatagtgaattagatataaactagttcattaatgcagaccattctcctttcctcatgaagagccaaagttgtactaaaattcatgcaaatttaatacaaatttaatttgtattaaaattggtgagtcatggcaaggtgtggtggctcacgcctgtaatcccagcctttggcaggctgaggcaggtggatcacctg

SEQ ID NO: 467 - DNA, 514 bp, Homo sapiens
gtaattaaggaaaactttccctcagggacattgctgatattgcaatcttcactagatacacttatctctacctccgcctccacctccaccttcacctccatctcttctctgtctctatctctatcttcctgttgtttatctatctaattatttataaatgaactggtgggtttgttgttgttgcagcctggctaatgttatccagacatatctgaaacctcatgagtggcatggaatggcagtccctgcttgaaccatttacctcctttcctaacaccaacaatcacacacacctgacactgacctgaagcctctggcctgtcctcggaggcaaagactgggtagacaagatgcctggttaccagcaatcttctgcaatttcctctgagctattgagattgcttttctctttgctcaaattatgtgagaaacttttaaaaaagaatttaatgtgctcttttgatatttcaggtgttcattcaaaagcctatgttattctctggctctctctctc

SEQ ID NO: 468 - DNA, 483 bp, Homo sapiens
gggatcatggtaattatagtggacatgagataaagaaaattgccccactagtgaagacataacactctattgaagagtacggccatataaactcataattgatatacaatgtggttgggcaaaacaggagagtccacccaaaggatttcacattattaaatactttgtcttaagcactaaatgagggtttgctaggataagaggagaaagacatactcaagtgatgtacctcacaggtacagagtaaggacaaaccatgctcaagaaatggcagggagtttgattggactacaggatgaaaaggatgggagaagacaagcaagtaaggtagagtcataaagattattacgggcacggcacagtggcttactcctgtaatcccagcactttgggagcctgagacaggaggatcataagatcaagagatcgagaccatccaggctaacacggtgaaaccccgtctctactaaaaatacaaaaatt

SEQ ID NO: 469 - DNA, 520 bp, Homo sapiens
agggcgtctactaaaaaatcaaattagctgggcatggtggcaggtgcctgtagtcccagctattagggaggctggggcgggagcattgcttgaacccaggaggcggaggttgcagtgagccaagatggcaccatgaataggttttatgccaatactacaccattttatatcaaagccttgaatatccaaggattttggtatctatgggaggtcctggaactaatcccccacagataccaaaggatgagtatacaccttttcttactttcgaattttgaaccagacagatacgctgcaattcaacaaattaaaataactgaacctacaatcaaggagaaaaatatttatccctaataactaatggaccatcttacgccgtctataaaaatatcaattaagaagtcacggccgggcacagtggctcacgtctgtagtcccagcactttgggaggccgaggcgggcaaatcacttgaggtcaggagtttaagactagcctgggcaacgtggtgaaaccccatc

SEQ ID NO: 470 - DNA, 378 bp, Homo sapiens
acagaagggatcattagttggtaaagcaaagagaaaatttaagatcagactactctggaaatatggtagggttatatatatatggtacagtacctccactgggatattaagaatctttcagtaaagatgaaggttgctcttcaatgcttctttagaatgatttgtgtgtttttccagatgcatccgcatttgagattgaacttaagtttagctgagtggatcaagatggcccacatttgtttggaagttatgtttgaagtgttatgagaaaagagaggaaagagttgcttattcagtaaatggataagtggaatgaagaaaagacttaaatgcagtctttcggctgggtgtggtggctcacgcccataatcctagcac

SEQ ID NO: 471 - DNA, 496 bp, Homo sapiens
atgcagaaggattagtgctccagaagatttaggtaatgcagtgaaaatctgaaaagatacaaaattaagtatatgtgaaaataattaaaattagaagaaatcagacccacaagagaagactgtgactatgacagaagaaccaaatagcaatgccagaaatgaaaaatacagtgattaatgtttaaaactttccatgagtgtgagctggacttgttgactcacttctgatgagtagagtatgaaaaaggaaaaatagcaactttacaatgcacctcctctacccaatgaccaaggttaacatcactattaataatacattgataagactgatatgtgcctcttgatatggtgcaatgagaagggcatatatataacctgtgaggtattcttcctccaaatccgtaacttcggtctataatgagaaaacatcagacaaacccaaatcgaggaatatgcagcaagatacctgaccagcactcttcaaaactgtcaagga

SEQ ID NO: 472 - DNA, 493 bp, Homo sapiens
ctacggccgcgagaagacgacagagggtccctaatacaaaagaagattaatcacaagaaacgcctccattattcttcatgaagcccagtctagtcctacagatgcactggcacagggtctttggggatctctcatcaaaaatccaaaatgcataaatatctgaggtgagcaatgttcattaccttaattttatcttaccacattttattcaaaaattgtaataccagctggggtgcagtggctcatgcctgtaatcccaggactttgggaggccgaagcaagaggatcacttgagcccaggagtttgagaccagcctgggcaaaatagtgagaccctgtctctattagaaaaggaaagaaaagaaatgttaaaaaaaaatgtaatactactttgtaccccataaagatacacaatgagactctgtcacaatataatttgtaaaagtcaacatccagagtgatctcaagaacttctgatgttcagaattagtct

SEQ ID NO: 473 - DNA, 645 bp, Homo sapiens
gggaatgctgcagctcagccgagcctctgactgcttgagggctgttggagctcctgaaagctgctgctagtctggtgttcctggagcaacacaagccttatgaggaaattgggacaagtttcggttctgttttggtctcagttgtaggggaaggaccatttgtggaggaagacctgagaaagagctttccaggcagatgggacaaaaagcacaaaatgtttgatgcaattgaggaaccaaagaaaggtcagcatgtctagagcacagtggacgtggagaagaaacaagattgaaggggtagtgggcccagaccctataaggccttgtcaacagccatgatctggagcttctatacacattgtagtacatgggaggcagtttttaagcaaagacatgccatggtatgttttacattctggctcttatgaaagcaaatgggatcagcgtgtataccacttaggaggcttgtgcagaggtccagtggcaatgtgatggtgtcttgggccaagtgaaagcacagaagtggggaccagtgttgtattcaggatatatgtagagcgctaagtagtgctaaaagatagagttgggtaagatggtaaggaaaataatgaaatcaaggataatttctaggtcttcagtgtaccc

SEQ ID NO: 474 - DNA, 512 bp, Homo sapiens
gggtagaatggaaataccagtgtttttctatactattagctattggacctggtcttttggtttttgtttaaatctttttttcagatgagatgggtaatgtgcagacgtcgtaagaaggttcgagtgtggcacatctcacgcttgtgtgtgaacacacaatcatcatgctcatgaactacaaaaggattggacattgtctttttgattattaatattgttaaataattgtattatttgtatagcatgttagcatctacaaggcacttttgatttaatttgactcaattaaataggccacagtgaccttgtctattttcttttagatccaaggtctaaggaaggatgaatcaattgaatttgggtgtccattttatactaaagttttcaatgttttggatctttaatcagttattgattctttcttgatatgaccagttgtaagaatggaagggagatagatttttatttttaatatttgtgtctcaatatacgcacttatgtgtcacttcctt

SEQ ID NO: 475 - DNA, 458 bp, Homo sapiens
acagagggtcccacggctcagcaagagctcatgcaagtcctctttggaggaatgcacgttacatacaagccttaagaaatttcaacttataatgtttgataataagggatatgagctcacaatcagaattacttaacacatgagaaaaataagccacttggggtcagtaaacaacaaaatcaattctaccaataacagcagcaataataataaaaacagctaacacttgtataggttactctgtagtgtgctagatacttgtcttaagaaatttatatttatggaagcatttaatcttcaaaataatccagtgagtaacaattactttatctttatttgccaaatgagcaaagtaaagcacagcatcttcagattttagaatgattagattcacatagaatctaaaacatatgtgtgtaatacatttgaggaaataaatgtcattaaaatcatgtctc

SEQ ID NO: 476 - DNA, 500 bp, Homo sapiens
cgacagaggggggggggataatcttctccctagagttgtcttgtcaaagccgagtcatgtatattacgtgcacatgatattgtttctctttatcatagcatctttatcactttatattatatatatttcaaatctttgaattcttaacaccattgaagtgcatttaccctctgtttattagtattatgtgataagtactgccaacccattctaacatctttattcttcagttggcacttttttttcatccctgaagaatttgcaatatagagaaaacacagaaaccattaaggtagaataataaggggcgtggtcggtttgacattggtaagaatttatgggccgggcgcggtggctcacgcctgtaatcccagcactttgggaggccgaggcgggtggatcaggaggtcaggagatcgagaccatcctggctaacaaggtgaaaccccgtctctactaaaaatacaaaaaattagccgggcacggtggcgggcgcctgt

SEQ ID NO: 477 - DNA, 493 bp, Homo sapiens
gggaactctgtacttaccattcagtttttttttctctaaatctaaaactgttccaaacaacatattttattttaatatggtaaacatgcaaaggcaaaccctatttcctgtacatagtggatgtctgataaatacatggcacatgaatgcatgatgggatgagtgaagaaatgaactgcgtgataatgtatgtgaaagtaccatgtaaacaaactgcctgacaaatgtggggggaaaagctagtgaggaaaaatggaaaacaagtcatgaaaaacattcagtgtaaaagtttgagaaggcataagaggaatttgaactaaagactgaaactattttaaactgtttaattttcagaaaaaaataatatagtttttattaaataaaaagttgatacctatgctttcagagtctgtgaattagagacaccatcttgacaccaattacttctcatattaatttggttttgttctagaggcttcagcttacaagtttc

SEQ ID NO: 478 - DNA, 520 bp, Homo sapiens
agagggcacttgaatgtacgtgtatgacaaaattatgcggaactaaacatatacacacacacacacacgagtgcatataaaactggtgaaatctgaataaagttggtggattgtgtaaatgtcgatttctattgggagaaactggttgaaaaatatataggttctctctgtattatttcttataattgcatgtgtatctataattatctcaaagtaaaaacttaaaaaaactagattatgatattttatatgtatatatatcataaaaaggtgtcccaatgtgtaagttgtaaatcacctcgcaacttactttttgaacttagtatactgaggcacttttttatgtgactacacgtagagctaccacattccttttaataacttttttattttgtatttaaataatatttgtttacttcacatttactttttatactaaattatattctcgtgtagtattattagaaaaactagacatgtgaagtaaaacatattagacatgtgaagttgtaattagcag

SEQ ID NO: 479 - DNA, 635 bp, Homo sapiens
gggctactcgggaggctgaggcaggagaatggcgtgaacccgggaggtggagcttgcagtgagccgagattgcgccactgcactccagcctgggcaacagagcgagactccatctcaaaacaaaacgaaacaaaacaaaacaaaacaaaacaaaacaaagaaatcatgtcatgggcagtggtggatgatattgagtttctatcaaagttggctttggtcactgaggaattacaggtgacaggttttaagcttgtgccggagagaagccagtgccccttggtacttacataatagggctcagagagatcaccctgggtggatctccccatgtattgcaaatcgataggcaggctgggcgctgtggctcacacctgtaatttcagcactttgggaggccaaagtgggtggatcacctgaggtctggagttcgagaccagcctgatcagcatggggaaactccatttctactaaaaatacaaaattagccgggcttggtgacgggtgcttgtaatcccaactactcgggaggctgaggcaggagaatcgcttgaacctgggaggtggaggttgcagtgagctgggatcatgccattgcactctagccggggcaccaaaagctcggatgatcctcagtg

SEQ ID NO: 480 - DNA, 569 bp, Homo sapiens
agggatagccaactgaacaataggaaacagcatgaagagaaaaacccagccaacagtttgacagtcacctccaatgactcagacttgtgattagaaccatctgagaccctccagcccctgacatgctgctgggtgactgcacccacataactaatcccagatcacagcagcagaagaaccacccagctgagccaagccaacacagagactcttaaaaaatacactaacttattgttttcaaccataaagttttgtgtcatttgctatgcagatataagtaactgaaacagaaattggtaccagaagtgaaatgtacccacaacaaaatttaaaacatgtggcattggctttggaaccccttagtaagcagaggcttggggaaaagtgaagggactgtcggaggctaagagaagggtaactatgttatattgtgatagaaatattagcgaaagtgtcatgtgcagtaacttgaaagatagaaattatacctaatgaactcatagatctggctaaaggaatcacaaaacagaaatttgaaacgaccaattgattttgctagcagtgtctga

SEQ ID NO: 481 - DNA, 476 bp, Homo sapiens
gtaccttgttcactttgttcactttagaaactctactgattttttacgactttctctatgtcttctctgacctgcctccctgggaaaggtgatcagacttcttccagtcttctgtggctctatcccggattacacacacacacacacacacacacacacagacacacacacacccataattctactcatcatagtgccttataatagtatttataaatgtaaatagatctccttactaaggtgagataactctacactaatcttgcaacaacaaaaagcactcaaaaaatgttcacctaatgaactgataaattaacttatttaagagcagtagaggcatagccttgataatgagtcatacgccatcaaaagagagtttcctcaacacatatgagtattaaaacagacttggacacacactcatgtgagatttctcttatctcctgtcttctttcttagccagttcctatcaaatt

SEQ ID NO: 482 - DNA, 547 bp, Homo sapiens
  misc_feature 436, 476: n = A,T,C or G
gtacgctcctggcagggctattacaagaataaaatgagttaatacaaaacaccaagaacaagatctgcttatagtaagggctggtgaatgtctgccttcatttttattattgcaaagtaaaaattcacctattgaaaattatacagaagagcatacaatgaaaagtcagtctccctatgattgtgtatcttctgcctttctccccagaggcaacctctgctcgtagtttcttggatccactgccagaaatgttctccgtgtgtggggtgtgtgtgtgtgtgtgtgagtgtatgatttttaaaattatatatattacatatatattgtagaatactgaatacttttagatatttgtatatactttgctttctttccttaactcagtgtcaaggagatttctccagctaggctcagtggctcacgcctgtaatcccancactttgggaggccaaggtgggtggatcacctgatgtcangagatcgagaccagcctggtcaacatggtgaaaccccaactctgctaaaactataaaaattagctgggtgt

SEQ ID NO: 483 - DNA, 522 bp, Homo sapiens
  misc_feature 363: n = A,T,C or G
gggggtgcatgactgccctgagcagccaaggagccaattctttaggaggctgagtgccatttcagctcaagccttcacggggcatagccaaaagcaacttggaggggtgggtggagcatctccactgcagcttggccccaacaaataggatgtagcagcagctcatcttgtggatggtgcgcaacaatttgggggcggttcaacagcaacaaagctggtgggatggaagtgtactgtggctacctatccccagaacaggacacattccaacaatgtttctgatttcaaatgcagtagccacgtgggtcacagtggtgagtattttctcctcctctgtggggagtgtagctgtgtggattccanggagttccctcaactgggcttagtgcctgtgagaactgcaggggtcaccataagtgaggactgtaggtgcctaaggtggtgatgggggctgctgtggtcctcttccttaccttttccctgcaaggagaatttccccctggttccaactgatcctgatgt

SEQ ID NO: 484 - DNA, 318 bp, Homo sapiens
  misc_feature 111: n = A,T,C or G
ggggggctctgtgaacaactttgcagacaactttgtgtgctggtgcattgatgtgttttttggggaaagcatctgtaacttccagcatattcttgagaagggttgacttanaagtctcctgactgtactgttttcagtcttgttatctccctccagcaattatattttattttttgagatggagtctcactgtgttgcccaggcaggaggctgtggcatgagaatagctgatgtttcagtgagccgagatggtgccattgcactctagcctgggtgacagtgagactctgtctcaaaaaaaaaaaaaaaaaattaggg

SEQ ID NO: 485 - DNA, 438 bp, Homo sapiens
aaatgcaaatttttgcatttttagtagagatagagtttcactgtgctggccaggctggtctcaaactcctaaccacatgtgatctgcctgcctcagcctcccaaatgctgggattacaggcatgacccactgcacctggctgggaaaattgttataacatggattaaccatgaatactatgattacacacacacacacacacacacacaacgcgcacacacacacacacacacacacacacaccaccctctcacctctcccaaggggaaaatgcattgaaaaagactaaaaataaatatgttattccacgttctctgggcaaagagttgataggtaaggatttgagatggaataaaggagatatttcatgagagccttggtgctggtgtttggacctggagaaatgacaaaagatctgtctggaacatgcatggacag

SEQ ID NO: 486 - DNA, 561 bp, Homo sapiens
  misc_feature 512: n = A,T,C or G
ggagaaggcttgggggttgcagaaacagtccagtaaaggctactgaatggaggaagaaggcagtgactcacgcctgtaatcccagcactatgggaggctgaggtgggtggatcacctgaagtcaggagtctgagaccagcctggatgacatggtgaaaccccatctctactaaagatacaaaaaattggccgggtgtggtggcacacgcctgtaatcccaactacttgggaggctgagacagaatcgcttgaacctgggaggtggaggttagggtgagccaagattgtgccactgcactccagtctgggtgacggagcgagactccgtctcaaaaaaaaacaacaaaaaaagaagtcttgagttctcttcctctaccactaagccccatgcccaagaaataccggtaggaacaaagttctttttttttagagatagctctgtactgataaaacacatatagccaaattgtcttgggtacctaaagatttcatggtttctgaactcaaagtancatttaaatagcccttgaggctgggtgtatggctcacattggtaatcct

SEQ ID NO: 487 - DNA, 604 bp, Homo sapiens
ggggctaataggtgttaaggaggcatgctgtcctttggcgttaagacagatcatttcctcagttgggtaatgtttaaggaatccactaaatccttaaatatatggcacacataaggaatgcagagcttttatacactcagccttaacatgggttattttttagcatggctaatggctaaacttgatttctactgggtttgttcaacctatttctaacttataggtaaaagcctgctttttatcctctccatcctcatcacctttttagttgtgtctctgcttgattcttcttgcattcaggtctatattgtattataaaaagaaagagagagacagagagacagagagagaaggaaaagaagaaggaaaaaaaaaccacacacattgaatgggaaggcaggagagtagagctctgaccccagctctgtcatagccacctgtgtgactatttgcaagcattttcatccattcaacaaatacacaccaggtaccggagatacaaaactgtgaaagacacggttcttaccctcaccacttacagtcaggagtagagagttaggtacacaaatagaatgtgaaatcacttctcctttctgggtcttca

SEQ ID NO: 488 - DNA, 531 bp, Homo sapiens
gggaagcccatttctagatctccttaatcagaaaacagggtgcagggcccaggaatttcctttaataggccctccagatgactctgatgctcaacaaagtttgagaatcacttgtttagtcccaaacctgtgtttggatgccatttgcattacttagaagctaactggggactagttactttatctttggcctctttatttctatagaaagaggacaaccctctctacctattaaggtcatgatggggaattaaggtgacatgtataaacgttttgcacataagtgcttggtgaacaataactgctggtatctggtaccatcttttaaaagccatggtggtagacagtgagaagacaaaggcataaaaggtgggcccagccctaacaggtttgcagtcaagtagaggtggcttacatataaataattattagaccagaaaaatggtaacgtttctcataaaacccaagccaaggatggtttcgcttgttttttttttctttcagcctgatagcaaatgtgatagttgaaag

SEQ ID NO: 489 - DNA, 462 bp, Homo sapiens
gtcattgtgagagacattacagagattcagcagattcctattcctgggtctttcctccttcactttatttctgtctaaaatgtggaaattattggacctgtttactcagagcctgctttctcttcttttctaatatatttatgataatatgatatattcagtaatatgcttcttttcacaaggcaaaatgattgactttttttttttttgaaaataaattctttttttgccccccaggttgaatggcaccgggggaatctaacttcattgaaaactttgcctttggggttaaagggattctccggcctaaccctcccgattagcgggaactaaaggcccatgcccccaccccgggctaggttttttttttttttttaaaaaaaaaaaaattttttccccctttgggcccaaaggggcccaaattcccgaccctgggggaatttccccccccggccccccaaa

SEQ ID NO: 490 - DNA, 618 bp, Homo sapiens
  misc_feature 513: n = A,T,C or G
agaagggtataattataaaatcaaaagtgatttttatgtcctcatgttataaaggaaatagccacagaatcaactagagtatttgttttaagtgtaaaatgtgaggggaggatgattttttaaattgatacaaaataattatacatgtttatggggtacatcagatatgttggtatatgcatacaatttgtaacgatcacatcagggtaatcaggatgcccgtcacctcaaatatttatcgtttctttgtgttgggaactttccaaatcttctcttctagctattttgaaatatacagtaaattattaactatagtcaccctactgtgctgttgaatactagaacttatttcttctaactgtatttttatacctgttaaccagtctctcttcatcttccctccctcctaccttccccagcctctgataacctcattctactgcaaggagaataatttttattgctagaggcatcccaaaatgtatagactgaaagaagcgggtggatcacgangtcaggagttcaagaccaacctggccaaaatggtgaaaccttgtctctaataaaatacaaaattagccagatgtggtggcgggtgcctgtaatcccatctactcg

SEQ ID NO: 491 - DNA, 580 bp, Homo sapiens
ggtttggaaacttcctaaatcgctttgctgtgtgtgtttacacgggtgggttttgttttacttgccctgagagcacacgggagtgcagcacacaccccaacccacatcaactgccattaaagaaaagaaatttcagcccagaatttcatgtccagcaaaattaagcatcataagtgaaggagaaataagatccttttcagacaagcaaatgctgagggaatttggtatcaccagatctaccttacgagagctcctgaaggaagcactaaatatggaaagaaaagatcatcacctactactacaaaaacactgaagtacacagtccaatgatgctaaaaaccaagcacatatgtaagtctgcaaaataaccagctgacagcatgacgacaggataaaatccacacataccattactaaccttaaatgtaaatgggctaaatgctcccattgaaagacacggggcaagctgggtaaagaaccaagacccactggagtatgccgtcttcaagcaacccatctcacgtgcagtgccatacataggctcaaaataaaggaatggagaaaaatatttcaagcaaat

SEQ ID NO: 492 - DNA, 419 bp, Homo sapiens
ggggaaaattagaaaaggggtgatataatttgactctgtgtcaccacccaaatctcatcttgaattgtaatccccgtaatttctcacctggcaagagtgggaccaggtggagacaattggatcatgggggcagttttccccatgctcttctcgtgataatgattgagtctcatgggatctgatgattctataagtgtctggcttttctcctacttgcactcactccatcctgccaccctgcgaggaaggtgcctgcttcttctttgccttccgccgtgagtgtgagtctcctgaggcctccccagcaatgtggagtgtctagggagtcacagctgaaatcttccttggattaaaggctgcgggtgtcacaaacaggtaggaatattcaagtggtaaccttgaataattactggaagctg

SEQ ID NO: 493 - DNA, 478 bp, Homo sapiens
ggggaacccttctctcttaaagttttttatagcctctatcatcatgtagcatgcaatatgtcatttacattatttgacaggactccttaccagaatgtaagctccaggaggactagcacgttgtttctattccattaacatttgttgaatgcgtggtataagttgagtcatttagttggttgttttaaagagtcaaacagcagaaagctgttggatcttggaaatagttaatgaagactatgaaaagtaacactatttctgttaataattgttgagtgatacaaggattaaatagtgaaattattttggaattcacattatcacattgaaggttctgagaaagtctgtaggatggctggcaaagtttttctgtaaagagccagaaagtaaataattctagcattgtgggccatatgatctcatcaccactcaacttggctactatagggcaaaataagccatagacaatatgcaaatc

SEQ ID NO: 494 - DNA, 606 bp, Homo sapiens
ggggtgttttgaatttaagaatcaatgtctgagggacttttgtgtgtgagccaccgcacctggcccagacactgtaagttttggggaggattaaatgggatcatccatgtaaatgcgcctatcccagtctctagcacacactgaacactcaaaaatgggaggttttggtatttcagaagaaaatcatgtgtcggggagtgttagtagtaaccttgaactatatgcaaagactaaagctaggaagataggaagagttttacaagatccttttggctatatagttaaagttattagcagttagagtttcccttacagttgacaagtgaaccatacaagtgaatgacttgtggttcctcagataaaagcacgagtcacagttgtaatttctgttttgtggacgtaattgttgaccaagtgcactgaaggtagggatggccagtagcaaaattataaagcaggcctgtttgtcttcaaacactcctgagtaaacttgtcatttccttgtaaaaatgcaaaatagactactgagtagaggtgatcaattacagaaatgcacttactttggctgtcttctgaaacctaataaaatgacagtaaagggattat

SEQ ID NO: 495 - DNA, 554 bp, Homo sapiens
aaaaaagcaaatattatcaacagtaacattctgaagtttgttctgagacattgtagtagtcacacatgaacaggcatttcacatttttcttttgtttttttttaataatttttcagcatttcactgatctttcccttagggtgccaagatgcctcaagggttgcatcccttccatctttgaaggtaactgccctctgcttccctttagagggctggatttctactttgtatctcacatctttgtctggttttaagtcatacagattctttcatatgaatcaagaaattcacatttgataaccattaactatatccattttagatgagaaagaattatcttgtgattaaattttaaaacagtctctgggccgggtgcggtggctcacacctgtaatcccagcactttgggaggccgaggccgttggatcccctgaggtcagaaattcaagaccagcctggccaacatggtgaaaccgcgtctctactaaaacaaaatacaaaaattagctgggcgtggtggtgcatgcctgtaattccagctactcgggaggctg

SEQ ID NO: 496 - DNA, 548 bp, Homo sapiens
ggcagctagtcttcaccattctccttcatttgtagcctaggatatgcttgtcctagaatgtcatttatcagtaaattccttattgggtcaagaaagtctacgatacaactaaggatgaagcaatataaactgatggcaaagtttttgcaagcacaatatatactattgcagctgcaaatcattagaataaatatttgctgttcagttgttttgattattatagacacagtttaagtggagtttgttaaatagaattttaatcatgaaataattattactaaatattaattttatgtgaattaatccttcttgtaaaggagacaaaatattccttgaaatgtacactttgagataaagaagtatattttatttcgtatacagagcatctttcctgtggtaaattaaattcactggagcagataggatccccataaaccataagtaaataattttctcctctctttccctatgtgagaatttccctgctgtttcaatgttagtatgttcttagcaaattttcagctgtctgtaaaaaaagtcttaagtct

SEQ ID NO: 497 - DNA, 649 bp, Homo sapiens
  misc_feature 374: n = A,T,C or G
gtgctttgacaaattttcctttagattggacatcaataggctaatcctgaaaacataagctaactcagagaataagtaaacattaaaataattttaagtgataggaatccaatgaatcaagaaataaataataatcactaaatgttaacatggataagtctggtggtgtggtttagaatgatacattgagatactaatttctcctgctttatcctgtttgagtttgtttaaaatgaacatagatcatttttaaaaaatgaagactgtacttctcaaacacaaatagtatgattttgtttgtggaaaatttttaaaagtttaaattaatttatagttacagaaataaattaacatttgattaggcctaagtgtanggagttgcctgcaaaaatcatggggaaacttttcagtgatgaaaatttctacaccttgacgggggttgtgcttaccctggtgcatcaacttatcaaaactgatacaacattctactgaaaataggagcattttattaaatgtaaattatactttaataaaatcaactttaaaaatgccatgtgagaaactcataaaaactatcaatagcatagatataggtatttgcatctcaaatatccacacaaacacatgcacactcacacacatactttct

SEQ ID NO: 498 - DNA, 525 bp, Homo sapiens
  misc_feature 454: n = A,T,C or G
gagattctatacagaatgagcatgcctcctctgactactatgccccactccacttccacattcttttttagccttagtataattacttccatgtcaagtcaaggacttttactcattcatttctgaattcctgttgcttaccactttacttactagtcattaataattctttacggccagacgcagtggcctacgcctgtaatcctagcagttcgggaggctgaagccagaggatcacttgagtccaggagttcaagaccagcctgggcacataggaaaaccccatctctacaaataatttaaaaattagctgggtgtggctgggcgcggtggctcacgcctgtaatctcagcactttgggaagccaaggtggacagatcacgaggtcaggagatggagaccatcctggctaacacggtgaaaccctgtctctactacaagtacaaaaaattanccgggcgtggtggcaggcacctgtagtcccagctactcgggaggctgaggcaggagaatggcgtgaacaca

SEQ ID NO: 499 - DNA, 512 bp, Homo sapiens
  misc_feature 454: n = A,T,C or G
ggcgcggcgcgcccgagggagtctcctccagaccctccctcccgttgctccaaactaatacggactgaacggatcgctgcgagggtgagtccaggggcgtgggtggcttccctcccgggaacccacactgctcctctgggtccctaaagcaacgtcccctccttgccactgcacatctaagaagcccaggcctcggtgggcgggatgactgggaattgggaacataacctacgccgcgaccattctgggtggctaggatggaatcctggtggagaagatggacacccccgcccttgacgtctacccgagctacacaaacctactccttctgcactttccctcttccgtttaatcggtgccccgtccttcctgctctccaagtctgtttgtggaggaagggttggaggggagaaagaactggaaagtactcaatgaaatgtggagccagatccanggattccactgttttgtgcagcattttgtgcacgaaaaaaaaaaaaaaaaaaaaaaaa

SEQ ID NO: 500 - DNA, 476 bp, Homo sapiens
acctgagcaaggatttgagaccagcttagccaacatagtaagacccccatctcttttaaaaaaaaaaaaaaaaaaaaaaaaacccttttaaaccggggggagggggcaaagcccggaaacccaacccaaactttggggaggcgaaaagggaaaaatccctggcccccaaaataaaaaaaacccctaggaaaacataggaaaacctggtttttacggggaaaaaaaaaaaaaaaaccggcccttaaaaaaaaaaaaaaaattaagccggaaaaccgggggggaaaatccccccaattccggggggggggccttttttgggaggggccaaaaaaaacttttttaaattacccccctttttaaaagggcccttttttttttttttgcccaaaaaaaaatttaaccccaaagggccaattcctttaaaacaaaaaattttattcaaaaaaagggggggggggggggaaaaaaaaaaaaaa

SEQ ID NO: 501 - DNA, 523 bp, Homo sapiens
  misc_feature 441: n = A,T,C or G
ggggtggtgatggtggcacaaccaggtgaatggagttaatgccactgaactgtacgcttcaaaatggtgagttttatgctatgtctattttgccacaattttaaaaaatagacaaaagatctgagtggtcatttctccaaagaaaggattaaggagtgacaaggacaatgtctgattggacctaggttttcatttaataaaatcttatagtataaaatggttcttcttgcattaaaaattctttatggctgccacatttccctttaagaattctgttttcataaggtaaggaactgagtgcaaagacgtattctttctaaatgaaaccatgtctgtggcaacatatctttatatcttctctcaacaaatgtacgctaagaacccaccttgagctgggcgcagtggctcatgcctataattccaacactttgggaggctgangtgggcggatcacatgaaatcaggaatttgagaccagcctggccaacatggtgaaaccccatctctactaaaaatacaaaaa

SEQ ID NO: 502 - DNA, 455 bp, Homo sapiens
gggagtcttgctctgtctcccaggctggagtgcagcggcaccatctcggctcactgcaagctccccctcccgtgttcctcagcctcccaagtagccaggactacaggtgcccaccaccacgcccggctaatttttgtattttgtttaatagagacgggtttcaccatgttagccaggatggtctcaatctcctgacctcatgatccacccaccttggcctcccaaagtgccgggattataggtgtgagccaccgcacctggccacttaatgcattattttaatgtaaattgaattgaccactttttaaatgatggaacacctaaatggaattctataccactgttacagagaataagtctgctttatatatgctgacatagaaagatagtcacaacatattaaatggataaaaagcaatttgcaggctgggcacggtggctcatgcctgtaatcc

SEQ ID NO: 503 - DNA, 218 bp, Homo sapiens
ggagatcattaaatactgcatttaagaactcaaaacaccttgaatatgatctcattagtgatcattaaatgttgcacttaagagtacttaatgcaaaagcagtaattgaaaaaattggattattttgcaataaaaaattatatcctgaaaagtgtttaagaacttcacttaattttgaatgcatattttattttttttttttttttttttttaaaaaa

SEQ ID NO: 504 - DNA, 455 bp, Homo sapiens
ttcataactgaattcagaacaacaggcatagttgctttagcttgaaatacctatgaaccccaaccttaagaagtagatatcagtagatttattcagatactagatttaattcctctatgaagtttaacattttgatatttcaaaatttactgacacttattttatggcacaacataaaggctaaagaggaagttgagatttttacacctgctgtgcagtaatgagtgacctctttctccactgtgttaggagagagtacatgagatcttggacttccattcccacatggaggtaatgagacattcctccgtcttctatctggagtggtgtgagaggaggcttaatgcagcatcaggaatttcaacagtgtccaatagtaacaaagccagacaccctcagtgtcaatataggacacatgggagatggtaaaaaggcattcctctccctcccagcca

SEQ ID NO: 505 - DNA, 506 bp, Homo sapiens
  misc_feature 138, 235: n = A,T,C or G
gtgtgacagaccatgtgctctacaaagcctagaatatttactacctggacctttacagaagagcttgctgactgctcccttagaatggggctctgcaaagtgagcacaccctgggatcacagcccagcctgcccttanaacaaatgagaggatattttcaagcatttgcattgcagttttcacggtttttttgttttgttttgtttttgagacagagtctagctctgtcgcccangctagagtgcagtggtgcgatctcggctcacttcagccttctcctgggctcaagccatcctcccacctcagcctcctgagtagctgagactacaggtggatgccatcacgcccagctaatttttttttttttttaaaaaatgagggctcactgttgctcaggctggtctggaactcctgggtatttatttataaacagagtctatctttgttgcacaggctgcattgcaggggcgtgatcgcagctcactgcaacctccacctcccgggtt

SEQ ID NO: 506 - DNA, 377 bp, Homo sapiens
gacagtgaacctcatctctactaaaaatgcaaaaattagccgggcgtggtggggggcgcctgtagtcccagctactcgggaggctgagccaggagaaaggcgtgaacctgggaggcggaacttgcagtgaggcaagatcgcgccactgcactccagcctgggcaacagagtaagactccgtctccgagactgaaataaacttgaaggggctaataaagacatgtgtgagacagtccatcagtggcacaaggcctgtcttctcacaacacactacaccaaaacacactgcattgggaacaaagaaaacgtggtgtaatactggatttcttcttttaattttttttttccccttttgaaacggggtctcgctgtcgccc

SEQ ID NO: 507 - DNA, 458 bp, Homo sapiens
agaaggggcatcaagtgatccacctgcctcggcctcccaaatgctgggattacaggcatgaaccaccacacctggctggcaaaaagggattttaaaattaatttaaaacattaaaacaaaaatggttttatcactatggtaatattaatggtgttgcaccggtaggttgctcacggtttatgtttttgatgtgatatttgtcctttatgtgttaggaatacccaagccaagatgtgtgactgccaatttttgatcctaatagcttttctgactaaacctgttttatagctactatgatcaacatcttctggataccaagtgtttatatgggtagcttgacttgagagattgaaatgtttaatgagtggacattaaccttactaatttgtatctgttaagtgaagctaatttgtagcttatttgtctgatttgtggtatgaccctatttgtggtctgac

SEQ ID NO: 508 - DNA, 592 bp, Homo sapiens
  misc_feature 503: n = A,T,C or G
cttgttctttggccgagcggcctacggctgcgagaatcgacagagggtagttccggttttaaggaaatatagaaaatcatggtctgaaaattctcaaacctgaaaggtgatattccatttcaggcagaagaagaatttgctcctcaaaatagaaatgttgaaagagaaggaagttgacgtttaaaaaaagtagttgtgaaatagcagctgtttcttttagctctgatattcaataaaaataaaatttattttgcctttaattgtattttatttgcccatcatacataaaagtacttacattatatatgaaatattgtatatatcaggaacaagtgtaaagcttcatgaacaatttggagtgacttatagttttcttaatttaattatttttactttagtgtgctctaccagcagtttccactactatttaaaccttataaacatcttccagacattgaatatgactcttctgtttgtttaaccttgaattgtagctgtcttangaatgaaaacaagattggtattttcataggaaaatttggtaatcttaattgcttggaatggactgtaattcaatttggaactttttttc

SEQ ID NO: 509 - DNA, 498 bp, Homo sapiens
gaggccaatttgtagctagctggtccactcaggcccctccttgtcctctgcttcctactctctgtggctcgggtcacatgagcagaaggccatcggcgtgagggaaaccaggagacccggagttcctgcgtggcagacacttagtgtgacaatctcagatgacttcagctctgggtccctgtcttgagttgtctttgcatgatattctaaaatttaagaacttgttttaattatccattatttagtgatttgtttatttattttgggaggttaaatattttgttatttacacatataaagtaagaataaaaattgggcacggaggctgggcgtggtggctcacacctgtaatcctagcactttgggaggccaaggcgggcagatcacctcaggtcaggagttcaagaccagcctggccaacatggcaaaaccccgtctctactaaaaataacaaaattagccaggcgtgatgtcgggcacctgtaatcccagctactc

SEQ ID NO: 510 - DNA, 548 bp, Homo sapiens
  misc_feature 441: n = A,T,C or G
gatattaaataatcacggaaatgccttgcagaccggtatagaaataagaagggagttttgttcaaagggcaggggtgaacttttagtttgctgtgtgataattcaagccatgaaacaaaggaatgaaaggcctgtcaatattctcacaccagaccattagaggcatatctatagttgaataagttgggtttgtaacttgttgcaaataagggagactacacatcatgcagaattgtgtgacatttcagttaagagggtgttacaaatgacattataggattggggcttgtgttaggttattcagtggagagttcaagatagtgggactttggctacagctgtaatttgtaaataagcaacagttattcttattagctgggatgaggggatgcttgctataattgtagtttacatagtgatcttgttttcatctgtgcttanacaaaattacaaagtgttcttggttttgtctcacttcactctggttacagagtggccttgtctgatgttggtgttcaataaaatcgtttggtgggtatgtttgcttc

SEQ ID NO: 511 - DNA, 427 bp, Homo sapiens
ggatactccaaaccacttttaaaaagctttcccagtcttggaatgccttcttaaaagtgttcagtgtcacttaaaaatatatatacaaatgattcttatactaactgcaagcttttttatcacatttggaaggctgttttcttgtaatacagagagaaaaagaaggcagagggctcctttttaggaaattaatagtggtgttttcctccctttttctcatatactatctctaaagtcttcagacatttattttggccgggcacagtggctcatacctgtaatcccacaacttgggaagctgaggcaggaggatcatctgaggtcagaagttcgagaccagcctggccaacatagtgaaatcccatctttactaaaaatataaaaattagccaggcatgggggcaggcacctgtagtcctagctactc

SEQ ID NO: 512 - DNA, 529 bp, Homo sapiens
  misc_feature 285: n = A,T,C or G
cggagggtaatttttaaatgtgaaagcaggcaatattatcttgtaggtattgtattatattacaagagccaaagcatgctgattcccaatttcatccagtatgacttgtcttagaaaaagaaataaaaatgcagatccatttattcacttattaactgagtacatttcctgaatccatgtgcacgttgggtgataggaagctgatgccctgctggctaaagatgtaagataacagagcctaaaactggcacaccagctggaaattaggagggcaagtttccctanaaatgggagaaccacagataggatgaaccccaaaatctgaatataaactctttccaaatacttggctgaccaccaacttatgcaaacataagggagacttcagtaggccagcctgaaacaaagcaactgcagaagctgaaaaatttagggatttgtcagttgctgcatatcacaggagatcagagcttgtagtttgagtccaggtcagctaacttcttaccagaacaataagccaatgatcacc

SEQ ID NO: 513 - DNA, 620 bp, Homo sapiens
taccattatggtctcagtttcagtttaagttcttagatgtaaacaatagaagctgtgtatgggaaatgcatgtggaacaataagttattttattagtaaatggatgtaggatttggagaagataattacaatgtctaaagttggtatagaattaatgtctggaaagaacccttataaattcacaagtaaaaggtagtgaaacaaaaagaaaaatggacacaggatatgtcacgaaaggagaaactcaaatagctaacaaatacatatataacaagtaaataaacaactggtaatcagggaaacaacagcacttcgcatcagtcagagtatgaaaaataagaaagtaggatgatgccaagtgctggcaagagtgcggggaagtaggaaaccacgcatacctgatgagagtagagacggatatacacattttgcatatgtcctatctagtaatcctcctcataacatagactccagagaaatgaatatatatgtccatgaaggggtatgcttgaagatgtttattgtggcattgttacagcagggagctggaggcaacaaccaaatttgccatcattaggagaagagataactaaatacgataacgattattatgtattact

SEQ ID NO: 514 - DNA, 622 bp, Homo sapiens
  misc_feature 508: n = A,T,C or G
gggactatttttaataaaaacttctatttcaaaacttttgtctcaaaattatttattgaatgttaaactaaaagccttctataattgcttattttgtttttcacaagtctctcacatttaaaattttgaatttcaaccactttttcatttggaaagtgatgggcaggttacaataaaaatttaaaatacatgtattctaattccaacaaaatgccagaaagatagcatcaatgccaatggagaaaaaatagagaagatccaaataaacataagtagaaatgacaaaggggatgttaccactgatcccatagaaagacaaatactccctagagactactatgaacatctctatgcacgcaaactagaaaatctagaagaaattaataaattcctggactcctataaccttccaagactgaaccaggaagaaattgaatcccagaacagactaataatgagttccaaaactgaatcatcatataaagactatcaaccaaaaaaagctcangaccagatggattcagagctgaattctaccagatgtaaaaaaaagagatagtaccattcctgccaaaactattttaaatattgaggaggacaggctcctctgtaacttattcta

SEQ ID NO: 515 - DNA, 541 bp, Homo sapiens
  misc_feature 198, 242: n = A,T,C or G
tgcttgttcttttggccgagcggcctacggctgcgagaagagacagaaggggtatgggttctggactctgcctggagagggtttgaacagacagaacacagtccctgctttcaagaaactcacaatgcgctgtggggaaagagacaactaagtggatggtgctgtgtgaaaatgtttgggagattcaggggtccctangaagggtctaccccatccttgaggtgccaggaaaggccttctanagaaagtggtactcaattgggtatgattttgtgctaacccttctggaggtggagggggggtcatttggtagtgtctccagagagacagttgaagcactgttggttgtcactactggggatgagggaagatgctaccagcatctagtggggatgtcagggatactgctaaatatcctacaatgcccaggacagcctctcacaataattatcaggcttcaaatgggaatagcaccccgagtttgataaaccctcctgtaagttgagattgagggatgaatacaaattggtggtgctggggg

SEQ ID NO: 516 - DNA, 498 bp, Homo sapiens
ggtacccacagtcttactcctcctttgctcaggcagctctatgaaggcctcctcagtgctgcatatgtgccctacgttcctgtattgtccaccgcaccatgccctgccttccagccaccccacctgctccttccttgccagctccacctgacactgactctcttgactctttgtggctcaaccttctgattctccctattcagctgggagacattccccacaacagtgacacctgtatacttcaattaaggccactttgcacatactgagtaaacactccctaaattgggctaagaagaatgcacaaagtcacaaagtcctccaaactatgtgttagttacaaagagaataatattaactttacagtggagaaatccagcagacaccacctgtgttagtttcttatgactgctataacaaagtaccataagctaggtggcttaaaacaacaaaaaatttttgtcttattctggaggctaagtctgaaatgaaaatgtc

SEQ ID NO: 517 - DNA, 472 bp, Homo sapiens
gacttggggttgtatctggattccactattatcctgtacatctttggcaagttactattagtacctggacccatttgctaggtagcaatagagatgaagatttatttatttatttattttgaaatggaattttgctcttgttgcccaggctggagtgcaatggcgtgatctcggctcacctcaacctctgcttcctggattcaagcgattctccgtctcttctaaaaatacaaaaattagccgagcgtggtgccttgcatggctgacacagcttacagagtttgttttgtcagggtttcaaatgagtggttgatgactacataacttaatgtatgtcatgaaattcttcacaatgagtacatgtagatgcatatagctaatacgtacaatagtatttgcctgtgtttgatgggtttttcacaatcggtttgtagttagattattgtatttgcatttttgttggacacttaca

SEQ ID NO: 518 - DNA, 558 bp, Homo sapiens
tcactctgtcacccaggtggcgagtacaaaggtgcagtgttggctcattgcagcctcgaactcctaggctcatattttcagtttttaagtatcagaatttttgcttaaaatgcctttttgggctggcgcactggctcacgtctgtaatcccagcactttgggagactgaggtgggcagatcacctgaggtcaggagttcgaaaccagcctggccaacatggtgaaaccctatctctactaaaaatacaaaaaaattagctgggcgtgatggcacacacaattagagacttaataaaaataagtaaaaaaagaaagatttttcaggattttttatatagggtctctctctgtcccccacgaggtttaatatattttgtatgttagagagaggctatatctttggggtgttgtaatgaaggtgttcatttttgccacactaaggtgtaaaagggatgtgtctggctgtatgttctatatagagtatgtagaacagtgttatatgttgtcagaattttgtatgtctgcaaaatacttgtgtatagcagacatttcttaatt

SEQ ID NO: 519 - DNA, 580 bp, Homo sapiens
ggggataaagatcacagagaagaagatatgatggtgccggtgtcactgagagatctactgacccgatgttgccttcttttgctgccttgtgtgtgctgtacgtatcctgcgttaggacccttgctttggcagcgttagctacaaagtagtggaatgtcccatgcagttatttctgtatttctgttaggtctgttcctctcaatctcctcagactgacttccatatcctcgtttctcaagagtgtggtgcccccagaccagcagtatacacatcaccaagagctgattagaaatacagaatctagagctccagcccagacctgctgaacccgggatctgcatttaaacaaggtccccaggggattcatttgcattggagtttggattcactctggagtttgagaagcacttttgttctcttcctacttttctacttctaatgaagtttaaaaagtgcagaaaacaaactataaaaggattaatgtagtaaccctgctgtgtattgactaacccattatacttagtttattgttttacagacttacctgccaacacattagtgggccttgaattaacataat

SEQ ID NO: 520 - DNA, 425 bp, Homo sapiens
  misc_feature 334, 377: n = A,T,C or G
actgagcaactggccataccctgctgtgaatgaagtcagctgggagaagcatccaggtcagcccggccagcaagagaatctgggccacgcatgtccttggaattttctagtagccattttttatttcatttcatttcattttgaggatctcgttctgtcacccaggctggtgtccagtgacatgattatgactcactgcaccttgacctcccaggcttttaagtgacccttccacctcagcctcccaagtagctggaaccacaggcatgtgccgtcacatgcagctaatttttttgtatattttgcagagacagagtctccctttgttgcccangctggtcttgaactcctgggctcaagtgatctgcccaccttancctcccaaagtgctgggattgtaggcgtgagccaccctgcctggccct

SEQ ID NO: 521 - DNA, 649 bp, Homo sapiens
  misc_feature 87, 568: n = A,T,C or G
gatcaggactcactgcagcctcaaactccgtgagtcaagggagtcactacacccagccaggatcagtttcttaagtacattctttanaacttccttttatgaatattgtggaagcaaaatctctcacttaatttgccttaaatgcctgtttttcatcttcctttttgaactttttatttatttatttatttattctttttttgagatggattcttgctctgtgggctaggctggagtgcagtggctcaatcttggctcactgcagcctccgcctcccgggttcaagcaattctcgcacctcaaactcccgagtagctgggattataggtgcacgccaccacacctggctaatttttgtatttttagtagaggcagagtttcaccgtgttagccaggatggtctcgatctcctgacctcgtgatctgcccgcctcggcctcccaaagtgctgggattacaggcatgagccatcgcgcccagctaccatcatcctattttgtgctttctgcatgttccttctgttctagtttactttccttctttgctttcttttgaattattttctttntcatttcaacttttcctcctctactagtttgcaatttatactcagtttttgctttcttttcatggctcatcaacagtgcta

SEQ ID NO: 522 - DNA, 640 bp, Homo sapiens
  misc_feature 258, 348, 365, 388, 491: n = A,T,C or G
ggacagcccctctggtgtgcctggaatttatcatacaaagatgcatgaagtggtccttgtccttgcagaaagtgaggatgttgtaagaaggaatagggaggtaaatggcatttgcagagggtactgcaggatcagagggatgagggggactgccaaagaatatgaagctgctggtgcgattgtgcacgcctctatttgcagctactcaagaggcaggcaggagggtctgtcaagtccaaaagttcaaggccagcctanggaacatagcaagacccatctctaaaataaaaattttaataagaatgtggagtctaggccaggcatggtggctcatgactgtaatcccancactttgggaggctgangcaggtggatcacttgaggtcangaattcaagaccagcctggccaacatggcgaaacaccatctctactaaaagtacaaaaattagcctggcgtgatggcacacacctgtagtcccagctactcangaggctgaggcacaagaattgcttgaacctgggaggcagaggttgcagtgagccgagatcgcgccactgcactccagcctgggtgacagagtgagactctatcacacacacacacacacacacacacacgaaaaaaaaaaaaaaaaaaa

SEQ ID NO: 523 - DNA, 624 bp, Homo sapiens
  misc_feature 339, 513: n = A,T,C or G
gcgaggtcaggagttcgagaccagtctggccaacatagtgaagccctgtctctactaaaaataaaagaaattagctgggtgtggtggtgtgcgcctgtaatctcatctacttgggaggctgaggcgggagagttgtgtgagcccgggaggcagaggatgcattgagccgagattgcaccattgcactccaccccaggtgatagtgagagactccgtctgttctgtagatttctgaagacaggtgaaactgaaagagaaagcttagattataccactaaggggcctcagaagatatgggagcaagtctagcaaaatccaataggggggctttgggcctanaattagtgtgaaatcggactagaaatgatgattaattgagggcctatatagagaaaagatctcactcccatatccactcctgtgcatagaggacaaaagcagtaaacatttacacaggggccgggggtgggggttttcttaagaaaattgaaaaaactgtatggtgaggactanggcttggagtgcttacatcaatccccaaagaaaagcatttagagaaccatgagccgtaacattagctccctatactcttacctttaaatgaagtttcataatatacccact

SEQ ID NO: 524 - DNA, 595 bp, Homo sapiens
  misc_feature 161, 385: n = A,T,C or G
aaagggtcacaatgaaaagtaaatgtaaattataatgacctccctagggggaaggtcaggatacctaacaatattgcaactatacgtataagagtttatcttggccctgcgtggtggcacggtgactcatgcctgcaatcccagcactgtggggaggccgnagcgggcagatcacctgaggtcaggagttggagaccagcctggccaacatggtgaaaccctgtctaaactaaaaatacaaaaattagccagacatgagccactgcacctggccctggactgtcttcttaatgccccagaaggtgactagcagaatagaaatgttcttatgccggctgggcacagtggctcacaccttgtcatcccagcactttgggaggctgangcaggctggtctcgaactcctgacctcatggtgcacctgcctcggcctcctaaggtgctgatattccaagtgtgagccaccacgcctggccttcttttttattttcttattcttgagaaaggatctcactctgtcaaccaacctggagtgcagaggtgccatgatggctcaaccgcagcctcgacctcctgggcaacgcaccgcgactct

SEQ ID NO: 525 - DNA, 374 bp, Homo sapiens
tgaaccacagacattataagtatatagtagttgctagagagttcttactttaagtgatgttatactagaaaaaaatataattcttagtcttaaggaagttttatatatcatattatgtctgtgtgtgtgtgtgtgtgtgtgtgtgtgtgtgtgtgtgtgtgtgtgtttgaacacacgtatgaactttatattttcacaccttttaggggtctctgggctcactcactcatttatatgattcttcttctgtccccaatctggccgagataccttgaatgtgatgaaaacatccctttattctaaaatatagaaagaaatctgaaatttctatcgacagttttggactgtgctacaaaccttattctcctaatatt

SEQ ID NO: 526 - DNA, 516 bp, Homo sapiens
  misc_feature 339, 372, 417: n = A,T,C or G
gacataaatcaaagctggaactcatagatgtttttttgtgcaatgtacatagaatcttatcccaaggatcctctcgcaaagaaaaggatttggcactgcatcaaaagattgaccattgaatacatttttgtgttttaagttaatgtgaaatgtttaagatatgggccaggcacagtggctcacacctgtaatcccagcactttgggagactgaggcaggcagagtacttgaggtcaggagttcaagaccatcctggccaacatagtgaaaccgcaactctactaaaaatacaaaaattagttgggcatggtggcgtgcacctgtagtctcagctactanggaggctgaggcaggagagtcgcttgaacccangaggcagaggttgcagtgagccaagactgtgtcagtgcactctancctggcgacagagtgagattccatctcaaaacaaacaaacaaacaaacaaacaaaaattaatcaggtgtggtggcgggcgcctgtaatccctgctactc

SEQ ID NO: 527 - DNA, 414 bp, Homo sapiens
  misc_feature 280: n = A,T,C or G
agacgacagaaggggaaggtcaagctaaacaaggtctagacaaaacttaaacaacaaaacaaagtcaggcactgtacgtaggtcacaatgactgtataactagcttgaagaagaaatgaacaaaactttctttgctacacctgccctatctaggtcaagagtgaagcccaagcctgaggcctcagatgaagggaagtgggtgtgcctgtcaggcatggtgtgggataaggaaacagataaactactggccaggcgcagtggctcatgcctgtaatcccancactttgggaggccgaggcgggtggatcacctgaggtcgggagttcaagaccagcctgagcaatatggagaaaccccgtctctactaaaaatacaaaaaattagctgggtgcggtggcgcatgcctgtaatacc

SEQ ID NO: 528 - DNA, 570 bp, Homo sapiens
atacctggcacataatagttgttcaataaatgttcactcttgttctttatttttagatgtcttaaatggcattagcactcagcctgctttaccaggttactatatgagattctcctactaaaacagaatgaggaaaatgtacagttaattgatcaattttaaggagaaactgttttcttgtaaaatgtttctaagcccaaaaattatttgatcgcaaaatgttcgtattgaaatataagtgcctaatttcaaaaaggaagctctttagcaacaaagttgtttcctttttttccaatttaagatatttccatctctatttcaaatgcttgcttctaaaaaaaagtttagtgaaataagaggataaattttatgtttttattgatttgaatgacattttcccttggatgaattatgaaatgtctggttaactttagcattagtgaagcttgaatagattttaatattaagcaagtgtttagttgcttgacatgatcagtttacactattgcagagccttaattaaagttttattaaactgtgtaaaccgtgatccagtttggatttgaaagt

SEQ ID NO: 529 - DNA, 568 bp, Homo sapiens
  misc_feature 300, 476: n = A,T,C or G
ggcggttgctgcagctttggccgaggttcgggctcgaacttggaaaatgctcctggcgcctcagggaaggtccttctcaaagaaaaggatggggctgaatcgctggaaacggttcacaaggaagccgagtcccaaggtgatcccaatcgagagctttggagggcggggactttcccaaggcgcggcgcagtcaggaagccagtcgcggcccgtctgtgcttcctgcctcttcatcctgagctgacacgcccctgccttgaccgccccaaagccagcattaccctgagtgaaatgctctangagctctggggtctgggcacattacggctttggtgggcagcatcgtggaagaactgtttgtaacgcttttctaaaaccggaggtgtctgctaatgcccatcggggtgaaaggagtttgcaaactccgttccccctaccttaaattttaagaaacttctcgcacatttctttctttntctctctcttttttttttgcaaatcttggggtaattgatctttattaacgggagagagcttcacattaaataccctgcctatattcctgccc

SEQ ID NO: 530 - DNA, 464 bp, Homo sapiens
  misc_feature 298, 331: n = A,T,C or G
ggccgagcatctttccagattgttattattgtattccctttttccagatgaagaaagaggctcagagagattttgcaacttgctcagggtcacacagctagtaaatggcaaaggaagcgggctaggtctgctgggcttcttgtgctacgtttccccacctgcttgcgaccttggtggcataagaaagacttgctttcatgactagagcagtggcgtacatgaacacgccaggaagtcaggctcagtcctgcagctaaaaacgaagagagcagcacagaattgagaaagaacagctcangccgggtgcagtggctcatgcctgtaatcccancactttgggaggtggaggtgggtggatcacctgaggtcagcagtccgagaccagcctgaccaacatggtgaaaccctgtctctactaaaaatacaaaaattaactcggcgtggtggcaggtgcctgtaatccc

SEQ ID NO: 531 - DNA, 554 bp, Homo sapiens
  misc_feature 418, 493: n = A,T,C or G
gacagaagggggttgaacaagaattgctgggctccagtcctgcctttggcccttccctacatgtgaccttgggccctctttgcctttcagaatcaatacagtgagagagttaacacaagctcaggttagtaagtcattcaacaaacatttactgagcgcttatcaaatactgcatgctggagtggacactggagaaaaaggtgaggagaaggccgggcgcagtggctcgtgactgtaattccggcactttgaggggcagaagcaggtggattacctgaggtcgggagtttgagaccagcctggccggcatggcggagccccgtctctactaagaatacaaatattggccaggcatggtggtgcatatctgtggtcccagctactcgggaggctgagcaggagaatcacttgagctcangatgtggagcgtgcagtgggccgagattgcgcctctgcactccagcctgggcaacatagtgagactctgtctcanataaataaataaagtgaggagaaaaaaataccatctctgtcttcacagaacttatagtttg

SEQ ID NO: 532 - DNA, 522 bp, Homo sapiens
ggtaaccaaatgatcttaattgtctagtcaaccaaagtttacaaaaaataaattctgccataactgtgactcaaatatatgcgaatgcataaaatatgggtaagaaagtgaatttgaggcttgaacacaggtaattaagaagatcttataagaattgccaagacttgatggctaaggactcaggtttagaatataataaggaaaggtcttctgcttctggctatgacagagttgctagaatcagatgaattcatccactgagaataactataaaacttgagaacaactataaaacttggacaaaatacaaagcaaaacaaaacaaaatctgaaagctctgtagaacaaccagtgcagccaggacctcagggaccaagatcctggagagaaggaaaacatattgaagtgagtactgctctaagtacagctatttcgccttggaatgtttgctgattcaaggcttggggcatagaggcataaaaaatgacgcattcttgaacctgtggcagttgtactgggctg

SEQ ID NO: 533 - DNA, 519 bp, Homo sapiens
taaattaaaatactttgagttttattttactcacaatttcaataccaaaaagtttgagagtatactgtgtgagagacaatgtggaaccaagttctttcactcatttctggtgggagtagagattgatacagccctcatggaaggcaatttgcaacatataaaaatttataaaatctagggccagggacgttggctcatgcctgtaatcctagcactttgggaagccgaggtgggcagatcatttgaggtaagtgggtcgagactagcctggccaacatggcgaaatcccgtctctcttaaaaatagaaaaattagcctgatgtggtggcatgtgcctataatcccagctactcaagaggccgaggcaggggaatctcttgaaccccggaggtggaggttgcagtgagctgagatcatgccactgcactccagcctgggggacagagtgagactctgtctcaaacaaacaaacaaaaaatttataaaatctgatactttttcaccatggagtttcttctg

SEQ ID NO: 534 - DNA, 431 bp, Homo sapiens
gggggagtttgcagttagttgagattgtgccactgcactccagcctgggtgacagagtgagactccttctcaactccatctcaaaaaaaaaaaaaaatgatttgccccaaaaaggtttccctgtggccggactctaatgattccaagtccagttttggggggcaggaaaaaaattccaaaccacaccaaactcagggcaaggggccctgggatgtattataaataaagggggggccatattgctgactcttaaaattacccacaacaaaacttttaaaatctttatggcctttggaaaccttcaaaccttaaaattaaagttactttaaattatatttatcacggtttatatgctaaaatcctggaaactagcttttgattaaccatgagggtaaatttttctgattcccatatttttgggtttcttaaaa

SEQ ID NO: 535 - DNA, 561 bp, Homo sapiens
tgtccactaaagagaattataaatttgtgaatgacagtctgtaaatatgagtagcacacagtcagtggtcactgtgaagactacagaaaagcaattataatgaataatgggtaaaaatatcaaaatatataacttttacatatgtacccaaattatgtttgcatgtggacaaggacttgaagggaataaataaacatgaaaattgtttttgggtgatgaaagtatgtgtgatttatttcttatttgagaattttagtttgtaccattgagatgtttttatttttatgcaagattgaaaaaaacatggaaggcaatggaaccatagttaaatatgagaattatgaaaacagaataaatgctatatatttttttcttttttccccacagtcccatcagctatcaagtttctttatttgtagggagaaggaaaaagctccccattcaccacaattctgtacatgcctcatcctgtcacccacagcagtcaacaaagagtgcaaggcagattattccaaaaagaatagcagttgacatccaatagtgccaaaactgtttttagtc

SEQ ID NO: 536 - DNA, 490 bp, Homo sapiens
gctgggcccctgattgaggggaaatggtatcaatgagtaaacaagaaacacaggctggaaatgcttttttttttgagacggagtctctctctcttgcccaggctggagtgcagtggtgcgacctgggctcactgcaagctccgcctcccgggttcatgccattctcctgcctcagcctcccgagtagctgggactacaggcgcccgccaacacgcccggctaattttttgtctttttggtaaaaacggggtttcaccatgttagccaaaatggtctccatctcctgacctcgtgatccgcctgtctcggcctcccaaagtgctgggattacaggtgtgagccaccacgcctggccggaaatgcctttatggtttccagggttcagcagatttcaggctgtttcttttcacgtgtatgaaaatggacacaacgctcaaaggtatacctctggaggggcaaaaaatgtctatcctgattttttatgaaaata

SEQ ID NO: 537 - DNA, 567 bp, Homo sapiens
gggactccagcgcaagccacgctgcaaatctctatgccaggcagtttgtgcctctgagctctgccatgccattcccttttcctggatgatctcttcaataaacctttactgagccactcctggggcagggattattctgcaactgtgctgcaaaggtaaacaacctgggctctcttctccagaactcatttccaacacttgaagagacaagtaagaaacttcaagtcagtgtggagagtgctgcaagggccagtactggacatgatgggagacactggaaagtcccaaacctagtttagggtgttaggggacttcctggaatcggggacatctaagctgagccctaaagtaggagacagtcagatgggagagagtaaagaagaagacatttcaggccaaatgcctgaataccataccctggagtggtcaggttggttctctggtgggaacacgaagattctcctgatcttctcctccctactctcaacactctcaacattcgtagtttttacctccactaaatactctttcctatattatagtgatgttacccctttatctactgga

SEQ ID NO: 538 - DNA, 380 bp, Homo sapiens
agaagggcactactattgggttaaacacatagtatgtttttaaattataatacggcttgcttaaaacaaaatgtcaaaaatctggttactatcactgaatcatagctcatatgcttcatgctttactgtatttcttaatttactttacttttcttttttttttttggtgaaggcaaaattttcactctgccccctaggctgaaatgcaggaacccaaaaacatggaattgccctccaccctaatcaacaaaaactttgtctcaaaaaaaaaaaaaaaaaaaatttatttatcatggctcaaccttcaaaaaaaaacaataaaagggctaagggggttaagggctttggttaccaaaaatactagggagttaaaacctccc

SEQ ID NO: 539 - DNA, 601 bp, Homo sapiens
ggtacatagtaggtatccaatacatattgtgagaaaataaattagaaatattgttttatgacagagttataaagctctttaacatttataccatagctattgtaatcctttaaaaagagtagtaaaaaatgaccttaaaatggtatttagaaatttatccaaaaaatgaaaataattataaatgaaataaataattattggaataaatcatttgataatcatttgtcaagcacttattttatattacttccaaaggaaggcaatgatgaaaatatataataacaaggataagaagctattcctcaactattgtaaaatgggaaagaccacaaagagaaacaggaaaactggcctagaagagcaaactattaaaatacagatgaaggggcagggcaggggaaaacttttggccttacttttctcaagggaagacagagaactgactctaacaaaatagaaagctcccaagagaggaaacatagatactaaaggaatgccaggtcattccagaatgagcaataggaaattaaaccaacattcaatgggttctatccaaagtagaccataagacagagaaactcctgtgaaatctgtatgaaac

SEQ ID NO: 540 - DNA, 379 bp, Homo sapiens
gaggtacagagcttgataaattcaggaagtttgtacttgaaatttgctaagtaagtagatcttaaatgtttttaccacaattagctgggcatgacagcatgcgcctgtagtatgcttatagtcctggctactccggaggggctggggcaggaggactgcttcaactcaaaagtttgaggctgcagtgagctgtgattgggccactgcactccaggctgggcaacagagaccctgactcaaaaaggaaaaaaaaaaaactaactgaggtgatggatacgttaattagcttaatagtggtaataacacacacacacacacacacacacagttttggtttttttttttttggaaaacaacccctcccctgggcccaggttaa

SEQ ID NO: 541 - DNA, 433 bp, Homo sapiens
gggtgatccacccacttcggtctcccaaagtgctgggattacaggcgtgagccactgcgcccggccacaaaactatttttgttcacacattacagatgacagtgcgaagcgtggtcctacccctatgtttaaaataacctattagtgagcaacaatgtccccagcacttatcactctttccactctgtttctggtggcataggcttcacactgcacagggtcacattttcaaatcttattccaaggtttgttctcccaccgtcttatatctcctagttctcacttaaggtcctgccgacttatagctttctatgtcttccctaagctggggaaaaaggcagggtggtaatgaaagttcttggctgggcgcagtggctcatgcctataatctcagcactttgggaggccaaggcaggcggatcacttgagcccc

SEQ ID NO: 542 - DNA, 487 bp, Homo sapiens
ggtttcagttacataggaggaatactttctgaaatctgttgtgcagtatggtgactatagttaataataatgtatatttccaaaaacagaaaatagaactgctatatgatccaggaataggagtaaattttaaatatgtcaccacaaaaaatgatgtgaggtagtagatatgttaattagcttgatttaatcattctacactgtatacatttatgtttgatctattttaaaaagtagtactatagtatgattaaaaatgaaggctttaggttgggtgtgcccacacctgtaatcccagcactttgggaagccgaggcagacagattccttgagctcacaagttcaagaccagcctgggcaagatggtgaaaccatgttttcttttgtattttttgtagagaaaacatggtttttgtagagaaaaccttgttttctctacaaaaaatacaaaaattaactgggcatggtggtgtgcgcctgtagccct

SEQ ID NO: 543 - DNA, 477 bp, Homo sapiens
  misc_feature 383: n = A,T,C or G
aatcaggacaatcaattgtaccccctctagtgcctgtcactgttctttcagtgtcgtatttgtgaaataaatgtgaaatgaggacaataacttaatgttttgacatctagttttgggaatttgatgtgaaaaaaattgaagccatgaaaatatatatagataaatttgaccacaaatgtcattaaatagttatactttattggaattaagaattatttctggcctggcgtggtggctcatgctggtaatcccagcattttgggaggccaaagtgagaggatcacttgagctcaagaaattgagtccagcctgggcaacataaggagatcccatctttacaaaaaatttcaaacttagttgggtgtggtggcacaagcctatantaccagggaggctgatgtgggaggatcacttgtgccagagagatcaaggctatagtgagccgtgattgtgctactgcattccagcctgggcaac

SEQ ID NO: 544 - DNA, 557 bp, Homo sapiens
gggcctgcctattatttttatttttttcatggagatgaaatctccctgtgttgctcaggctggtctcgagctcctgggctcaagcgatcctcctgccttggcctctcaaagtgctgggattacaggcatgagccgctgcacctagccagaaatttctctctttccatgaaatataagtccaaaagtaggcagttcagggctgttcagccatcctcagtatttggcttccagcgttaaggtcacctcactatggtccatattccaaacagtgggaaggaaaaagggaagaaagatgcatcctcttccttttaagaagactgccttggggctgggcgcggaggctcacgcctgtaatcccagcactttgggaggcccaggctggcggatcacgagggcaggagagggagaccatcctggctaacacacagaaagcccgtctctactaaaaatataaaaaattaaccgggcgtggtggcgggcgcctgtaatcccagcaactcgagaggctgaggcaggagaatggcgtgaacccaggaggcggaggttgcagtgagccg

SEQ ID NO: 545 - DNA, 478 bp, Homo sapiens
  misc_feature 415: n = A,T,C or G
gaggtagaagccagggaagattctggattgcatatatttagatgggcctttcatctgattgtcaatttgtgtcactcataaaagagatatcttaattttaagtgcttccagaaaatgggaatgaaacaatgcttaaatagggccttcagatcaatttatggaatgatatcagttatcttaaaaaccctggaaatgagtgatttaaaataaacaactatggcctttttttattgtggttaaatagatacataacctaactatttttaattgtacaatttgactaggcatggtggcacacacctgtaatcccagcactttgggaagctgaggctggaggattgcttgacgctgggagttttagaccagcctgggcaacacagtgagccctcctgtctactaaaaaaatttaaattanctgggtgtggtggtgtgtgcctgtagttccagctacttgagaggctgaggcaggaggatcgct

SEQ ID NO: 546 - DNA, 603 bp, Homo sapiens
gggattcaaaccatagcaatagttcaattactttaaagcccaaaatgtcagtaattatattaaatgcaatttaatacatcagtaactaaatgagatagactaaattttatgataatcagactaatattatcagactagacttcaaaacaacccaacaatcatatgctgtttacaagagacacatttatggatactaaaaggtataaagtgaacagatgcaaccatttatcaaaagaaagctgttgtggcaatattactattagacaaaatagaattaggaaaaaaatcataactgtagataaacgtttcactaagttaaaggtttcactgagaagaaataaaaattttgaatttataagtacttataacaacattaagaaactagaaaatagaaaaagaatagagccaaattgactgaactagaaaaatagaaaattcatagaaaaatccacaatcatagtgggagattttatcatacatctctcagtaactgatagaaaaaccagacaaaaatcaataaggataaagaaaatgcgaacacaatgtagttcacataaggaacctatactacttccaacagcagctgaaatcacagagcatact

SEQ ID NO: 547 - DNA, 464 bp, Homo sapiens
gctgcgagaagacgacgagggggcggggcctcggtgtttaaaggctttgggtccgccggggctgcagcggcggcggctccgaagcgcttgttcttttttgtgaaaggcgattcctccaccacctcttaggatcttgggcaagtcactcagcctcgctgagcctgtttgcatcagtagggttttgtgaggctccagcccttcaaccgaacatttgctgagcatctactgtgtgcccagcagggccttcttagatcaggtataaggcaggagggaagcgtcgggagtcccaggcctgctgcctctgtaaccatgggcaggtggttcaacattacctccccttcttccccactgctctgccccatcctggcttttattgtatctcctctaaaagggtgtgagctccacggggaggtacccatgtgctttgaggaaggtctgccccagtttatattcaataggtactt

SEQ ID NO: 548 - DNA, 579 bp, Homo sapiens
cgacagaggggatttctgtgcatctggagatatagttaccacttcgtatttttaaatttacttttattggggcaggccttttcttttttttagaatgtaactgtagtatatgttgggtagggtcttttggcttttcttctaggtgtgttcagtgctaaagacagtattgtttccttggacataaatagtcttagtgcggtggctttctcaaatgccagttttagtagcagcaacctcctgagtagccagggtggtataggcaatgattgtaagaagcttatcttgttcccaagtgctctatagttgtgtaagcaaatgctgtaatggactgtgcactccaccctctaggccagtaagtaggtgacacttgcaggtaagacccatctgcagtggtagcagtttacaataattgaggaggtgagaattcttcctgactcattctatgaagccagtatcatgctgataccaaaaacatataaggacacaagagaaagagaaaactacagataaacatccctgattaacatacatgcaaaaatcctaggcggtgtactagcaagccagatcaaacagcacatc

SEQ ID NO: 549 - DNA, 622 bp, Homo sapiens
gcatgcgtatcattttacatgtacaaaatgttcctggaagcgtagtttgtattagcaaaaactggaaacaaatatccatcaacagtaagcacatattgcactatattcatataatggaatactgtactgcaatagagagcaaaccacggtgcatgtatcaacaggagtgaaatagtattgaatgaaataagacaaaagcacatatagtgtaatttatttaatgttccaaaaaaccttaggtaaacccaaaacatacaagaatgcactcatgtatagtaaaacgaaaaagacagaaggattgccatgtaagttagattaatcattacttgtaggagggaggaaagatgtatggtttgaaagggacatttgggagtggctatacttgcttctaatattcgattttgtaatctgtaagtttgcaattgaagttatacacttgggatttagagtaggattgtcccttggagatataaagttaaatacaaatataaatcatcagctctgagatgcatttatagccaaggaaattcatgataccatgtaatgaaatgataacgaagagaagggcctacgacgagttctgaggagcactgaaaggttctatgttggagggaaaatctgc

SEQ ID NO: 550 - DNA, 614 bp, Homo sapiens
gggccattctccatcgctgtgcttgtatgagtccaccttgttgcttccccctgccattaacatgcaggttcactcctgtgccagcactaatgtgtgcacagatgctggcaacactgttctccccccaacccctgctaccaccgccaccaatgctgccggtgtgaatgcatacatggacaccagcaactccatctctgctagtgtactgcccttgctgtgctgtcatcactggcataaacatgtgcaggaacaccacctccctgctcccacagttgctctgtgcaagccaacatgtgtgcaccttgccacattgctgtggctgctggtatgcatgagccagcatggatcccactgccactactccagtgacatgctttgaccagcacccttccccatcagagtgtggtggccagtggacaagaacacctcagtctctccagtgcagcagcttcctaaccttgaggggccagagaacaaggctgggggcccagtaccagcctcccagagttaaaacatgcagcccagcagtgtagagctgagccttggctttctaaaatcttccagagataaatgaagccagttgactgaacccatcatatgccacaatctaactc

SEQ ID NO: 551 - DNA, 624 bp, Homo sapiens
  misc_feature 549: n = A,T,C or G
gggccattctccatcgctgtgcttgtatgagtccaccttgttgcttccccctgccattaacatgcaggttcactcctgtgccagcactaatgtgtgcacagatgctggcaacactgttctccccccaacccctgctaccaccgccaccaatgctgccggtgtgaatgcatacatggacaccagcaactccatctctgctagtgtactgcccttgctgtgctgtcatcactggcataaacatgtgcaggaacaccacctccctgctcccacagttgctctgtgcaagccaacatgtgtgcaccttgccacattgctgtggctgctggtatgcatgagccagcatggatcccactgccactactccagtgacatgctttgaccagcacccttccccatcagagtgtggtggccagtggacaagaacacctcagtctctccagtgcagcagcttcctaaccttgaggggccagagaacaaggctgggggcccagtaccagcctcccagagttaaaacatgcagcccagcagtgtagagctgagccttggctntctaaaatcttccagaaataaatgaagccagttgactgaacccatcatatgccacaatctaactcccagggcatc

SEQ ID NO: 552 - DNA, 342 bp, Homo sapiens
gaccatttcacttcctaccacgaactaaaagaattgtatctcttcaacaaacaccactttatttttaaccttttttttttattgtggtaaaatgtatactacataaaatgtgccagtgtaaccattttaaaacatacaattcagcggcattaagtacattcacagtactatgcaaccataaacactatttccaaatctttttaatgactccaatctgaaactctatatccattaaacaataactcagattccctgtcccccaaacctgtggtaatctcaagtctactttctatctctatgaatttgcctactctagatatttcacataaatacaatcacact

SEQ ID NO: 553 - DNA, 423 bp, Homo sapiens
gaaaaaagtgttatgtacttccatgagatgtgggactcttaccatcaaggaggagatttttctgctcttaaagtggaggatgggggcattttatgctgtcccatcttctcttgtgttcgtcctaccctacctttctcagaatagagacctgagaggagggagtcctctctgaagcttttagggcagcagagtcattcatcttaggttaactagcagtacattttcttctcctctattgaacagcagagaacacttactaattcaggatttttaaaaagattaaaaattcatggctgggcacagtggctcatgcctgtaatcccagcgttttgggagtctgaggcgggcagatcacctaaggtcacgagttggagaccagcctggccaacatggtaaaaccccatctgtactaaaaataaaaaa

SEQ ID NO: 554 - DNA, 458 bp, Homo sapiens
gtctctgagtgatgcctgggagtctctacaacgtgtctagacactggaaccaaaaggaggatttgtctgaccagtctcaacaatgtgtatggggacacacaaatatgtacacaaacagattatacaactgtggaatagacatggtaggaatatagaatatatacaacatattaaaatatccaatataatagaacatttgctatttgtcttgtcatttttttcccatttatgagtactcacatgccccttacattaaattaaattaagtcaaattaaattagtttaattgtgggtactttgagcctataaggcttttatggaagaatcatatttcaacctctttttcctgagccattgtttcctgagacatctgaaaggtcttcctgggttcaatataagccattcatgggctttagctcagggtgcaattggcagactcttgactttgtcctcatcct

SEQ ID NO: 555 - DNA, 528 bp, Homo sapiens
gggctcttgcaatggagacggtcatttcttcagaagctccccagctgtggaaaatgagcatcctcaaggtaagtttactgaagaaaggaaactgggcatgaaaacaatagcctgaccctaacaatgtcttcaacaatgcttttgaatctctcccctggaaaaatcaaagcagggccagataatgtgccaaaccacaaaaatcagtgacagtagtttggcaagatcacccaggaataaatcttgggcagagtggggatgattaatatcttcaattatcaaaccacttgagagaaacatctgaggtacaggcaaaacttccataggcaactctgggctggctaccatgttttagaagtcctgggtattttctgcatagtccagaaacagtgctaccaggattttatcacccagcaagctcactaaagccactgaatgtacaccaaaaattatgcaaagggcttggtgcagtggcttacacctgtaatcccagcactttgggaggccgaggcaggtggatcacttgagctc

SEQ ID NO: 556 - DNA, 472 bp, Homo sapiens
gggcacagagagcttcggtagcctgcgaagcagccattttcacttccacggagcagatgctggcctgggtgctggaatatggaaatgaggaagatcctgcctgaggatttcatgacagtgctgcgattaccgacgtgagccactgtgcccagcctcactttaaaaaaaaaaaaaggttatgaagcatctcaacacaaaacctcctttgctcatcacaaccacccagtgaagcaggcaaaacaacaaaaactccccacctgtaataaatgtgaggcctaaattctcccacatacccacggcaaatgcaacccacagcggggaccaatggtgaaggatctaaaacctgaaaagaggccaaatgattcctcaaaaccacccaagtacaaagtaccaaagcggatctcaaatccaggtgtgtctgacttccaccctaatggcttttcttaaaaacacccccaaactcttggtaaca

SEQ ID NO: 557 - DNA, 594 bp, Homo sapiens
ggttagaaatgcaaattatcaagcccatttctagatctccttaatcagaaaatcagggtgcagggcccaggaatttcctttaataggccctccagatgactctgatgctcaacaaagtttgagaatcacttgtttagtcccaaacctgtgtttggatgccatttgcattacttagaagctaactggggactagttactttatctttggcctctttatttctatagaaagaggacaaccctctctacctattaaggtcatgatggggaattaaggtgacatgtataaacgttttgcacataagtgcttggtgaacaataactgctggtatttggtaccatcttttaaaagccatggtggtagacagtgagaagacaaaggcataaaaggtgggcccagccctaacaggtttgcagtcaagtagaggtggcttacatataaataattattagaccagagaaatggtaacgtttctcataaaacccaagccaaggatggtttcgcttgtttttttttctttcaacctgatagcaaatgtgatagttgaaagcagacactgatatgcctagaatcatgggattgacattacttttgct

SEQ ID NO: 558 - DNA, 551 bp, Homo sapiens
gagggataagttgtaagggttttgatgggccttttaactctagagaccagctagtccctaacatcaggtttgctagagaagggaagattctttccagccttcctggatgacacctaatacatactatattcctagtaattctgttatacttaagatttatgggttcatctttcctgttacactgtgagcccttcctgggctgggacgatggccagtttctcttgagttgtgccttgtgcctctgtataggcacagggcctattatgaagtagatatcaataaatattagttggaaaaaatgtgaattagtaaataataatttgtattgggtttttatgtgccagatgttttgaatacatttagctaatttaatcttcaaaacagtcctttcagatacatattgttatcttcatttaatagatgagggaacttgtcaaaggcctcagagatgtaaaatgtataactgggatttgaacctttgttcaaattgcttgttctcgcttgactcaagagccattatgttagaggcagacttcatagtcagttgatga

SEQ ID NO: 559 - DNA, 558 bp, Homo sapiens
ggtttctgaaactgtttatcaaaatttagcacagttccatttcctactggctccagacctctttgacctggtccctatgtgctgctgaagaattcttaaagagaagccttggcttgggaaaacatgaaaatgagaagggacacacagagagcccaaacttgtgactgtcgctcagacccaagccccttgcaaatggacatggctgagtttgggctgatcattagcgcttgggaatgatgtgaaactaaggtctatgacgggccacatgcacacagaaaccctcaacgccatgacagtcccagagtggtctcccaaaacatctaggcatccactatatctacaagaatgtggctgggcacgatggctcatgctggtaatcccagcgctttgggaggccgaggtgggtggatcacttgaggtcaggagttcgagaccagcatggccaacatggtgaaatcccatctctactaaaaaaataaaaacttcgtcgtgcatggtggcacatgcctgtaatcccagctacttgggaagctgaggcaggagaatcacttgaacccg

SEQ ID NO: 560 - DNA, 563 bp, Homo sapiens
agggaaactctatgcttgcattgcttggataaaaattaaaatcaaaacaaaacaacaaaaagaatacctcaaacttgggcctttaagccagaacaagtaaactacacatcacaagatcactagctaaggagagggagctccagacattcctgtccatagttgccttacttcccacctagcactgtcactgtgtaacattgaaaacaaattttaaaagcaaaaacagttttgggtcagtgtggtggctggctcatgcctgccaccccagtactttgggaggcagaggcggacagattgcctgagcccatgagtttgagagcagcctgggcagcatagcaagaccctgtctctgtaaaaagtaaaaaagaaaagcaaaaccagtttaatgaaaaccttaaatgcccagttaaagagttgatcatgccaaaaaggggataactttgagtaaaaaaatgactttaggctgggtacagtagctcatacctgtaatcctaacactttgggaggctgaggcaggaggatcacttgagcccaggagttcaagactaccctgggcaacatga

SEQ ID NO: 561 - DNA, 576 bp, Homo sapiens
acagaggggagattgcgccactgcactccagcctgggcagctagagtgaaacaatgtctcaacaacaaaaaagaaaaaagtagatattgctggtagctctgtttttgcctttcaggagcacttctgaagagaatgaggcttttttgagaggaaggaggattaatcatgaggacatgctttggaaggccagagtttgctgtcccgtaaagagattgtggtagagattttattttcagttggattaagtctagaatcacattgatagtgatttacattgcctgaagtagggaatttgctctttaggttggtcaattaattaggtccgcattctagatttgctagaaaaaggagcaactcacttgaagagctttgtggtggttgctcttatttcatatcctcacatgtttcatgattaaggatgaaaattgggcctggtgttgtggctcacacctgtattcccagcactttgggaggcaggggtgggcaggtcgcttgagcccaggagttcaagaccagcctgggcaacatggcaaaaccttgtttctacccaaaaaaacaaaacaaaacaaaattaac

SEQ ID NO: 562 - DNA, 538 bp, Homo sapiens
gaggggctgccatagatattaatggtatttctcctatagagaaagtctaccttaacagtaaaatttttaagatatgttatagcaaaagttttttctactcttaacacataagccagtataatacacctatcaataacatttaattactacagcaataattctctcaaaagaggcagctgccctaatgaatcgtcaattactctctataaaaggcttctgataatcatatgacttcagaaaaacaactttctagagtcatacagaaggaataccaataaactcctacctgttctggcatggctccatgttcaattccagtcttcaataatctgtagcaattaccaaagagatcccattttgtgagatcatgtgcactgaaataaacaaaaatgcatctgttttattctagaatggaaggaaatttaaatttgagctcagttcaggtgagtggaagaataaaataatttcatttcggctgggcacactggctcacgcctgtaatcccagcactctggaaggccgcggctggcaaatcact

SEQ ID NO: 563 - DNA, 490 bp, Homo sapiens
gctatagtaggagtttatgtttagtacacatttaataggcatctgtcatgtatcagcactaaaagtacagtgatgcacacactctcagcctttgtggtgcttacaactggctgatggagaacaacaattaaacaagcaataacaataaagtgtggtaagtgctatgactgggttggccatgaggagttaggagagcattggcatggcttctgatctagcttaggagatcagaggaagtgagggccaatcccaagcttgaaagctgattaggagctaaaggggcagggaggagctaaggagaagaaaagggtttcagatggggataactagttatgaaaagtcttatttgagaatgtgagagaattacaatatggctggagctctcagacgagaagtgtggtttagcaagaaataaagctagcccaggcacagtggtacacacttgtaatctcagcactttgggaagccatggcaggtgaattgcttgact

SEQ ID NO: 564 - DNA, 594 bp, Homo sapiens
gccaggaggtagaggttctggtctatcccatgttgttcttttctcaacatgatctacatagtaaactcgcccgtgctggtccactctctgctcccaacttaaatacaaaattaaaaggctggtaaaatacttgcatgagttacctggctttttaatcctgtctttgcatttccattaaatgaccattattgaactaaggcaaataaggacatcagtttagaaagatgatacaaatacaatttaggaataaagtgaagaaatgtaatcttcaggcagtggcacacagtgaattcaatttcttctatgcaagtatctgctctaggagaaaacatattcctgaagaggcttgaggtccgtctacctaggataccgaagtcactctcaatcagggtataatcaggatttgagtggaaagaaatggccaggcgcagtggctctcacctgtaatcccaacactttgggaggctgagacgggtggattacttgaggtcaggagttcaagaccagcctggccaacatggtgaaaccccgtttctactgaaaattcaaaaattagctgggcatgatggtgggcacctgtagtcccaactactc

SEQ ID NO: 565 - DNA, 491 bp, Homo sapiens
cgacagaagggctgactactaagtggaaaacaaccttagtctattgactcttggagggcagagatggatccccgagttttactcacaataaaaacctcagagcctactatagtaccatataattatttaataaattaatgaataacatacttaagaattgggagacgaaggcaagaggatcacttgaggcctgaagctggagaacattcttggcaacacagtgagaccctatctctacacaaaagttttaaaaactagaggacgtggaggcatgtagctactcgggagggtgaagtgggaggatcccttgtgcccaggagttcaaggctgcagtgagctatgatcgtaccaccacactccagcctgggtagaagaatgaaatcctttctctaaaaaataataatgatgatttattttacttaaattacatattatctaataatgtcagagaacaataaattctacatataagaagaatttccagataattt

SEQ ID NO: 566 - DNA, 508 bp, Homo sapiens
ggttaaaatggaggcattgttgcatttgattgaggggaggagggggatttggtgctgcggagatcctgggcatttgagctcatcgtgtccaggcggctgtgcctggtcctcaccctgcccatctgaccagggttcccttctccttgcagctgcggccccatcaatgtgaaaactgaacccatggaagattctggtgggtaccaagatgcttttagaatcaagtatcggccaagcgtggtagctcacgcctgtaatcccagcaatttgggaggccgaggcaggcggatcacttgaggtcaggagttcaagaccagcctggccaacatggtgaaaccccgtctctcctaaaaatacaaaaattatccaggcgaggctgtgcgtgcctgtaatcccagctaccagggaggctgaggcaggagaattgctaggacctgggaggctgaggctgcagtgagctgagatggcgccactgcactccagcctgggtgacagagcaagaccctgtctc

SEQ ID NO: 567 - DNA, 508 bp, Homo sapiens
acagaaggggatggttccaaccctggaaccccttgggcagagggccagttaggtgtccttttctgttaatactttgtgcagggttggtaggggccctcagctcataggttgaaactcaaacaagtattctctgcttcctgggtacattggtcattgaagagatttaatgtttccaaattgagtgttgtgacctattaatggggtcatgacatcaatatagtgggtttcaactagcaaatacatagattaaaatacagtaaaatcgaaaatatcagaatgcctcacctgtaaggataagcattgttttgtgaaaattttgtttaaatggtgcaacatgatgtaaaatcttctaataggctattcttagatctcagtcagaataagactccttccttgtagagaaggagtgcctaaaatattgttagatctttgttttcagatcttgagagggcccgagagaccggatggcagtttattactgctggcagttgagtgtggtgagaacata

SEQ ID NO: 568 - DNA, 331 bp, Homo sapiens
ggctagtttcttaacaggcagcaaggtagagtggttaaaagaatggagccctaagctatactgcccaataactctctagttgtatgatgagttacaaaagctctgttcctcactttcctaatgtataaatgcagttaataataatctcaatagggttgttctgagaattgagttactacataaagcacatggaatagtgtctatgtagtacccagaaaatgtttaatagatgttagctgtttctatatgttgctaattttaccagtataaccactattaatactacaagtactactggttatccataccaaaaatgttccataaaattttg

SEQ ID NO: 569 - DNA, 567 bp, Homo sapiens
cgacagagggtttctgaaactgtttatcaaaatttagcacagttccatttcctactggctccagacctctttgacctggtccctatgtgctgctgaagaattcttaaagagaagccttggcttgggaaaacatgaaaatgagaagggacacacagagagcccaaacttgtgactgtcgctcagacccaagccccttgcaaatggacatggctgagtttgggctgatcattagcgcttgggaatgatgtgaaactaaggtctatgacgggccacatgcacacagaaaccctcaacgccatgacagtcccagagtggtctcccaaaacatctaggcatccactatatctacaagaatgtggctgggcacgatggctcatgctggtaatcccagcgctttgggaggccgaggtgggtggatcacttgaggtcaggagttcgagaccagcatggccaacatggtgaaatcccatctctactaaaaaaataaaaacttcgtcgtgcatggtggcacatgccctgtatcccagctacttgggaagctgaggcaggagaatcacttgaacccgg

SEQ ID NO: 570 - DNA, 552 bp, Homo sapiens
gggaggaacagccgaagaggcgaacgggacagttcctgaaagggaatgtgagatttggcaatcaggatagctgtagcctttactacggaaaagtcagtggtggagacagcagacagattcagcgggctgaagagtaagcagaaggtgaggatgggtaggcaggagatagaaaccattattttttgaagtttgatactaaagagaaggaaaggctaatacttgaagggggaagttttctaaatgggtgggacttgagcatgtttactagcagaaggagagggaggtgagaggccgaacgtaagagaggcaatagtgggtgaagcaaaggccgtggagaggcagacgaaacggactccagcgcaagccacgctgcaaatctctatgccaggcagtttgtgcctctgagctctgccatgccattcccttttcctggatgatctcttcaataaacctttactgagccactcctggggcagggattattctgcaactgtgctgcaaaggtaaacaacctgggctctcttctccagaactcatttccaacacttgaag

SEQ ID NO: 571 - DNA, 578 bp, Homo sapiens
ggttgaacattatactgtggcaattcattatttcttgtaatatttatttttaggaaaatttccattcctcatcttcaaacaataatttatacattaatctcaggtctgaaatgtggaagaaagaaatcagaaatagttaaacgacattctgtccatcctattagtaacatcccgtttttccacattaaaggaagctgacatctggaaagggtatctagatagtttaagtgagttgtcctaataacttgttctctgtagaagccattgcaatttacaaagccttttcatatatactgtctccttcagtcttcacaacaaacatgtgaaagagatactatatgcttttgacaggtgagatatgaggttcagggagattaaataaaaagagaatgtgatagaactaaggttaaaaccatcattgctaattccagaatccagcaagtgtgaggaccagggaagaagtgtcactatctaacaagtcccagctttgggactgactctgcaccctaagcgttaaccatttggcagttccagacccaaaaatatttcatcatgatgttacgttttgtgagatgctc

SEQ ID NO: 572 - DNA, 517 bp, Homo sapiens
agaagggatacacagcacctattaacatctggaagaaatagtgttccttagagtatactttcagtaacatagcattagcttgtccatttccaaacctacactgttttagaatgagtgttggtaatcatcaggataggcactgggaaaggattggaagcagtgggatttgtttttagggaggtcatagggaatttaaggacttaaagatcaagaaggcatctaatagggttctatgtaaagataagagacgactaaaacaatcaggtaagaaaccttttgatccaataattctgttaaatcttccaagatatgtacatcaaattatataggcatcccttggagctattgcggcttcggttccagaccaccacaatgaagcaaattccacatgaaagcaagtgacacacactttttggttttccaatgcatataaaagttacgtttgggctgggtgtggtagctcacacctataagcctacccctttgggaggctgaggcaggaggattgcttgagccc

SEQ ID NO: 573 - DNA, 548 bp, Homo sapiens
ggaaccctgtagatccttctcagtctccaaaaaaggcaggggatgagacatgttcacatacaatgtagatgaaaagccaaacatcagagaattgaactctgccatctggggcctatttcacatttgtcatgaaatccgggcacggatcaattaatgacaggcagcaataccagttgtgaaaggtgacgcagcgtcataaataacatggtttggggcagaaagaaccggagctgcaagctgtcttctgcctggagattcaattctatttttccatattctatttgtgaccaaaaacacaagaaagatgttggaagcccagctaaaacttcttatgactggaagcacatgctaccagagcatctgtctctctctttattatagcgagtcatcagtcttccactgggtgagacctaaccaatccctctccttacagacatttaggttataataataataaaaataaataactattattatccatagagagcttcatagtttgaaaagtcctcttttatatattagctcatctacttctcacaataatccca

SEQ ID NO: 574 - DNA, 398 bp, Homo sapiens
agaagggggctcactgcaagctccgcctcccgggttcaggtgattctcctgcctcagcctcctaagtagctgggattacaggcgtacaccacacccggctaatttttgtatttttacaaaaccccatagtgatggggtttcaccatgttggtcaggctggtcttgaactcctgaccttgtgatccgcctgccttggcctctcaaagtgctgggattgcaggcatgagccaccatgcccggccaaaaagaatttctttaaaaccctagtgttatgtggtaactaatctagttgtggaaaggcaaaaagaaagtttgacaaactttgcttctaaaatttcaacataatttcagcacttcacagggctgaggtgggaagatcacttgagcccaggagtttg

SEQ ID NO: 575 - DNA, 576 bp, Homo sapiens
cgacagagggtctctggtgagcctatttaggaagtgttaacatatgaatagcttggaagttcagaaagcagctcaaaatggcccctgtttcccaaacccagcccccacctattaagcctgctcatgtcaaggtccagttccactgtcaccttctccttaaagccttctttagtcattccatctcatggtgatctgctcttgcatgtctgaactctgatgcagaagtgatggagaaaatttattccaccagaattcccatgtggaaaatcactggaaagaatactttgagaatcttagattgaaagtgagactcgaggccgggcgcagtggctcaggcctgtaatcccaacactttgggaggctgaggtgggtggatcacgaggtcaggaggtcaagaccatcctggctaacacggtgaaacctggtctctactaaaaacacaaaaaattagccgggtgtggtggcgggcgcctgtagtcccagctactcgggaggctgaggcaggagaatggcgtgaacccgggaggcggagcttgcagtgagccgagatcgcgccactgcactccagcctgggca

SEQ ID NO: 576 - DNA, 530 bp, Homo sapiens
aagagaccagatgacgaggaggtaaaaatgtgagcaatcaggactcaagaaaaataagaacaaatcaaaactatcatagacatgaagacaaaacaagaaagaggacaaggggagaagataaaaatgaaggatctaacaaaaggaaatggaaatagagagttttaaaagcctgagattcatgtgtattgcatattactttcacaaaaataaaaatgttctagagctatgttgctaacaatgtcaatattcttaactatataattgaaaatattaggccgggcgcgatggctcatgcctgtaatcccagcactttgggaggccgcagtgggcagatcacgaggtcaggagatcgagaccatcctggctaacacggtgaaaccccgtctctactaaaaaatagaaaaaattagccgggtatggtggcaggcgcctgtagtcccagctactcaggaggctgaggcaggagaatgggtgaacccgggaggcggagcttgcattgagctgaaatcatgccactgcactccagcctg

SEQ ID NO: 577 - DNA, 603 bp, Homo sapiens
  misc_feature 396: n = A,T,C or G
gggatagtaattaagttacacagaaagagaatgcaggtgctagtagaagaggaggaaagaaacagggagagtgagggagagaaagagagaagcaaggaacattatctacctatggcttccatctatctgattcactaaggtcaaaaaaattctctcatatcaactaagaaatctaatgaaaccaatcaacactagcttattcctagcatttagctgtgctgaatgctgtagagaaataggaggcgaagtttttctaatttatagtttgatgaaagcaaattagcatgtgtgaaatgtgtagaagacattataagatggcgggcaataatttcaagtacaagccacatatgctgggtgaagtcagagaatgagacttacgtgcagttaccacagggnccgtcgttcaggtcttcataaagagggtgagaacttgaaccagacctcagaggagagggaggaaggagaggaaggcagcacaaaaacacgaccatgagtgaatatgtagaatgccagttcttctgtgcccagagttcatatttagaaagagaatgaaaataaaattgattatattggacacagattagataatccaaatttaatagc

SEQ ID NO: 578 - DNA, 527 bp, Homo sapiens
gaagggcacacgtgtgtgtgtgtgtgaatataactatatatattccaagttaatgcttggatgtagttacaattttttttttatatgaaggctcgctctgttaccaggctggagtgcagtggcacgatctcagcttactgcaacctccgcctcctgggttcaagcgattctcatgcctcagcctcctgagtagctgggattataggcatgcaccaccacacccagctaatttttgtatttttagtagagacgaggtatcaccatgttggccaggttggtctcgatctcctgacctcgtgatctgcctgcctcagcctcccaaagtgctgggattacaagtgtgagccaccgtgcccggccatgaaatgctcttaagcaaaaagaagaaaattggagctacaatacacagaggagaactcttaacatgtatataattttctaaatttttttctattaatgtctgttagtctttttattagtatttctatatacatatattttacaaatgtaatcatattatctatcct

SEQ ID NO: 579 - DNA, 466 bp, Homo sapiens
acgacagaggggaatatgggaggcggaggttgcagtgagccgagattgcaccactgcactccagccctgggacaactaaacttccaagtttaagtcctgatttactacttgttggcttaatgaccttttgtaagtttcttaaccctttcagataggtctaagtctgtctgtgatgataaatttgttaaatcatcaagtcattgatttttataaaaatttctaatgttaaggtctaagaaatttttataagaactttcatttttggttactggtcctaagagagaactattttatcatgaatatcaaaaattttagtatttcacgtagaagttttttagttgagaccttttaaaatgcaggattactttagctaatttgacttcttttggatattgttgaatttaattttaagtcaaatttaaaattaaaatgaaggcccggcatggtggctcacacctataatcct

SEQ ID NO: 580 - DNA, 462 bp, Homo sapiens
gtttccatataaataatataattagcgtgtcagtatgtacaaaaaaggaaaaacaacttccttgatattttaatctatagatcaattgggggaaatttgctactttaataataatttttcttctattcatgaacttagtatacatcataatctatttagggttcctaaattcctctcagaaatattttgtgttttcaaaatacaggttttagacacattttaaaatgtttattcttcagtagtttaaatattttaatgccatttaaaatatagttgtttgtttccagcctatacaactatagctaatttttagaaagttaattgttaataacattgattggtagctttggataagatttgcatgcatgaattatcaaagtttatttaaatgaaatattttattacttcacatttcatatttcccatttaagtggtataaaggtatataatttcatttaccta

SEQ ID NO: 581 - DNA, 530 bp, Homo sapiens
gatctctgagtctagctacaggcctgcgtcgagttcctgtgtttacttgttgaacattatactgtggcaattcattatttcttgtaatatttatttttaggaaaatttccattcctcatcttcaaacaataatttatacattaatctcaggtctgaaatgtggaagaaagaaatcagaaatagttaaacgacattctgtccatcctattagtaacatcccgtttttccacattaaaggaagctgacatctggaaagggtatctagatagtttaagtgagatgtcctaataacttgttctctgtagaagccattgcaatttacaaagccttttcatatatactgtctccttcagtcttcacaacaaacatgtgaaagagatactatatgcttttgacaggtgagatatgaggttcagggagattaaataaaaagagaatgtgatagaactaaggttaaaaccatcattgctaattccagaatccagcaagtgtgaggaccagggaagaagtgtcactatctaacaagtccc

SEQ ID NO: 582 - DNA, 525 bp, Homo sapiens
agaagggttatatatatatatatacttctattttaagttcagggatacatgtgcaagtttgttacataggtaaacgtgtgtcatggtggtttgttatgcaggttatttcgtcacccaggtattaagcctattacccattatttttcctgatcttctccctcttcccaccatccaacctctgatgggccccagtgtgtgttgttcccctccatgtgtccatgtgttctcattttagttcccacttataaatgacgacatgcagtatttgcttttctgttcttgctttagtttgctgaggataagtctttattaatgataaactggataaagaaaatatggtccatatacttcatggaatactatgcagccataaaaagaatgaaatcatctccttttcagggacatgaatagagctggaagcctttaccaatattaattcaactattaattaaagctactaacttctgtcacaggccagaaaatactacaaaataaatggagaggtgtctgccacatgtaagcaca

SEQ ID NO: 583 - DNA, 488 bp, Homo sapiens
agtatgcttgttcatcagttgctaacactaggttggctacagatgtaagagtttagcaaagatccataaaaacattctttgaaagtcaatttgtctacatggaattttcagtaaagagcactatttcttattatttgaaaattgtgtgctagccacctttatatcagttaaagctcatgtatttgtatgtgcatgtatttttttcccctggaactggttattaaatgtttcccagtggaacactggctttaggcctccttttatacttcctcaggaaagctttgactcttttcttgataatctctggggaaagggacttgaaggaaaatgtttgctctgtaggttcatggcaggaaaacctttagacatgatcttagcaaatattctgagccccactccttctgtatcacctacctatagccatgcagttccttcagaggctcctaatttgggtatttactgcccagatttttgcatttctttacctt

SEQ ID NO: 584 - DNA, 446 bp, Homo sapiens
ggggaactcaagctattgtagtatttgtggatataaggcttttattcttgccaaacttcaaaacaggaaatcttgtatttattaactacaggtaaggcatacatgcatacacacacacacacacacacacaagttcatctagaactaagttttagcccaactcctaaagaatttatcaaaatccaaaaaataaattaaaaattaggctttctgggttaaaagtttgttttttactaaatttactaaaaaatccaccaataatgacacagcatttaaacttagccattttttcttgagagagaattttccacatataagctaatgtagcttaattcacaaagcaaggcactgacaatgcctaaatgagttcatataactctataaacaaataggtttggtcctggcctctttattcatttttagtaacacttgcaactatctgcatt

SEQ ID NO: 585 - DNA, 478 bp, Homo sapiens
gggttttaattcaccattgttggccaggctggtctccaactcctgaccacaagtgatctggcctcccaaatgctgggattacaggcgtgagccactgtgcatggccagagtttaaacatttatttatcaattactttgtccttatgaccaggggagtcagggacccctgtctttactacaaacaggcctggggaccaggacctttgtcctcccttcagtcagggccagggatgaggagctgacatgcagcatgaagcagcccaagggccgctctgacaaccatccaggctgactcctgctagtaatgacagagaaaaaaccaacaccaggtgcaggttaaaaataaaacaaaagccgggcgcggtggctcatgcctgtaatcccaccactttgggaggtcgaggtgggaagatcacctgaggttgggagttcgagatcagcctgaccaacatggagaaaccccgtctctactgaaaat

SEQ ID NO: 586 - DNA, 544 bp, Homo sapiens
gagggggacagcaacaaagggggacagcaaaccaaggggatgttctctgtgctttatggcagtggttctcgagctagagtgggcatcagacccacctgcagggatgattaacagggccccacacctagagtttcagattcagtaggtctcagctaagactgagaatttgcatttctcacaattttttagctagtgccaatgcacagagccaatgttctatagcttctttctttctgtttaacccttactaccagaagactaggatggggatttagaacaccatggctttcccacagtgaataaggcccagcccagattgcagttactcactgtggctgctaacctcattcatgggagtaaagtaggattttaattacctacctgttcctgaggctgcatctcatttcaatttagataatctagtcagtggcttcccaaagccagttaaagcatcagtgatactctgattgcataagcaaacccaaggaattgttgaaattacaaattcctttttcccgccctaggacattttgaatcagtaggt

SEQ ID NO: 587 - DNA, 588 bp, Homo sapiens
ggtactgggaaggtgtggcctactctgcctatcaatagtatatcttcacacattcaaatcacaaatatttaactacttctcttttaattataaataaaataaattttatttttgccagttgtccttcaatttaagattaggaattagcaatataattataaaatcaaaagtgatttttatgtcctcatgttataaaggaaatagccacagaatcaactagagtatttgttttaagtgtaaaatgtgaggggaggatgattttttaaattgatacaaaataattatacatgtttatggggtacatcagatatgttgatatatgcatacaatttgtaacgatcacatcagggtaatcaggatgcccgtcacctcaaatatttatcgtttctttgtgttgggaactttccaaatcttctcttctagctattttgaaatatacagtaaattattaactatagtcaccctactgtactgttgaatactagaacttatttcttctaactgtatttttatacctgttaaccagtctctcttcatcttccctccctcctaccttccccagcctctgataacctcattctactgcaa

SEQ ID NO: 588 - DNA, 539 bp, Homo sapiens
cgacagagggcggccacacttggccgatttttgtatttttaatagagatgaagtttcaccacattggctaggctggtcttgaactcctgacttcaggtgatccacctgcctcagcctcccacagtgctgggattacaagcgtgagccaccacaccccgctgggaaatatcttaaaagaatcaaaataagaaagttactctacttaaatcgtgtgctttttctgtgtgtgatttatggtaatcttaccatggggtatctgattactttagaaagatccatttagcttatttttttcttctttgggttatttttttcttccttccatttgcacagcctccccccaaataaaaaataaagatataaagtctatcttctccctcttgtcagtttaagtaaaaagaacttttgcttccattttaataatagaatttgtgtgtatataatataggcagtgatttggcctcaagctgagtttagatttgaaaagatgagaatattaaagcttgtcagccagcccacaaaccaagtcacaccagata

SEQ ID NO: 589 - DNA, 344 bp, Homo sapiens
gggtttacatataattatccacttcataacaaacctttaaggctaacctttggcgtggatgccatatttctttcactttagtgtgctgtcacttttaagatatgccattatttcatgtaccgcgaagaaaaaattgctgtcaagttatgacatactgtccatcttatgaagcatccttatttcagagaagttgaaatatgagaaaaaggatattttagaattgatgaattacagtgactagaaacctgggaaaactccatgccatcagtttcaatatccccaatcattcagtacttttaagtcaacgagtagtcagatttctgcttttctgtgtttgaggaaag

SEQ ID NO: 590 - DNA, 613 bp, Homo sapiens
attgtcatggagtgtttgtatcataggcacaacttacggtgattttctaaagatgtccccaaatatatattttgtcaaatgagtgaattatgctttggaggaaggtggatgggattgtgttggggtggttagggctccagcctccaagctggggcttccactgcagacattgttgttctcctgttttgtggatgggctgtctgaggctcagagattcagtagtgagttcaaggttccactgctagggcaaaagaacaaatcagagagatgaaagtggatctctaactgggcatggtggcatgtgccagaaatcccagctactcgggaggctgaggtaggagggttgcttaagcccaggagttcaagaccagcctggacaacatagtgagaccctgtctcaaacagcaaaaagagtagatctcctttggttctaacaagaggggatgtgagattcaagatcagagcccactgtccactctgctgtcttttcgtgcctcggtgtccccaagctgctgcccaggagcccaagggtgggcagtctttgtctgacacaggaaccccttcacttcacatttaggggattgaggcctagtggagcagggactcacccacg

SEQ ID NO: 591 - DNA, 549 bp, Homo sapiens
  misc_feature 491: n = A,T,C or G
gggcctcagatggaaatgcagaaatcacccgtcttctgcgtcgctcacgctgggagctgtagaccggagctgttcctattcggccatcttggctcctccgcctcagagccaggtgcaagttgataaaagaattctggaaattgaaggccaagggagagtgactcaaaaataagaagcaggctgaaaaatgagatgaggagaccgaggctcggagaggcttatgcatttgcccaagactctacaactccacaacttaacaggcaattgcatctagcatataatgtgttggttatccccagaacacagagcagtgcatctccacagcgagaattccagaacagggtaatcatcaagaatcaaatggcttggatctggtctcttctctttgaggaagcaagcaggcatggaggtgagtcaggccattggaagatttcctgtggctgatgaagaatccaactccaggttgctcttctttgaagaggattccaganatgcttaggggctgcttgtttggactgtaggagcttagctgagcaccaagcaccagca

SEQ ID NO: 592 - DNA, 523 bp, Homo sapiens
cgacagagggacatcctcctgtgtactttaaatcatctctaaattacttataataccaaatacaatgtaatgctatgtaaatagttattatactgtattgttttgagaataatgacaatagaagaaagtctgtccatgttcagtacagatgcaatcttttaaaagaatattttcaacccaaaattggttgattccacagatgcgaaacccatggatacagatggctgagtgtatatgtaatggcatgggtttaatagcagtgtcagttccatgcttttcaacattgagtataagaaattgaaatatttcccaggcttcttccatcagagatcaatgcccacagttgcttcctaaatgggatcagcatttccagatgttcatgacatgatatttctagcatctccatctgtatttttaaagtaggaaaaactgataaatcttctatattggaaagtagacatgaggaatttatgaaatttttatctttttttttcatcaaaagtacaatcttcaaagtgttgat

SEQ ID NO: 593 - DNA, 606 bp, Homo sapiens
  misc_feature 494: n = A,T,C or G
tttacatataattatccacttcataacaaacctttaaggctaacctttggcgtggatgccatatttctttcactttagtgtgctgtcacttttaagatatgccattatttcatgtaccgcgaagaaaaaattgctgtcaagttatgacatactgtccatcttatgaagcatccttatttcagagaagttgaaatatgagaaaaaggatattttagaattgatgaattacagtgactagaaacctgggaaaactccatgccatcagtttcaatatccccaatcattcagtacttttaagtcaacgagtagtcagatttctgcttttctgtgtttgaggaaagtgctagaaaaagagaagtgctcttaaataggcattagcacagaaggaactgggggcctagatcatagccaactggatggccgtctgtaagtgattaagaatagttgttagtttttaaaaagtggcctgtgtgtattttcaagagattacttgngaaaccctatgtgccatctttgcagctgtgcaaaacggtgaggacaagattgctttcaaaattgtggtttagattttgcttggatctcaaggtgaatgctgacaggccgttt

SEQ ID NO: 594 - DNA, 443 bp, Homo sapiens
gtacagtaaaaatcagtggttgaaaggtaatcaatagctttaaaaaatagaaacaattaaaatcaataaccttatcgatcatgaagacactggggagaaaaagaataggctaaccataaatcaagtataaaagggttaataataaatattaaagaaaagtaaggccgaacggggtggctcatgcctgtaatgccagcactttgggaggccgaggcagatggatcacgaggtcaggagatcgagaccatcctggctaacatggtgaaaccccgtctctactacaaatacaaaaaattaaccaagcgtggtagcaggcacctgtagtcccagctacttgggaggctgaggcaggagaatggcgtgaacccgggaggtggaggttgcagtgagccgagatcctgccactacactccagcctgggtgaaagagtgagatcctgtctc

SEQ ID NO: 595 - DNA, 531 bp, Homo sapiens
acagagggtttctgaaactgtttatcaaaatttagcacagttccatttcctactggctccagacctctttgacctggtccctatgtgctgctgaagaattcttaaagagaagccttggcttgggaaaacatgaaaatgagaagggacacacagagagcccaaacttgtgactgtcgctcagacccaagccccttgcaaatggacatggctgagtttgggctgatcattagcgcttgggaatgatgtgaaactaaggtctatgacgggccacatgcacacagaaaccctcaacgccatgacagtcccagagtggtctcccaaaacatctaggcatccactatatctacaagaatgtggctgggcacgatggctcatgctggtaatcccagcgctttgggaggccgaggtgggtggatcacttgaggtcaggagttcgagaccagcatggccaacatggtgaaatcccatctctactaaaaaaataaaaacttcgtcgtgcatggtggcacatgcctgtaatcccagctactt

SEQ ID NO: 596 - DNA, 512 bp, Homo sapiens
gggctttctgtgagtatgttacagtgaaactttcaatgaagatatgtccaaatgcagttaatcagaaaccagccaaactagcctaaacatttatggatattacaaacattcttccaaaaattttttttcttctgctcaattttgtgctgttttaaatgattatatgtaattaattttcaaggaacttagttgagccaaatgtgaatcttttgaggttttcctattgctagcaattgcttccttaagaatatgaaataggcacctggtttttttaatgctactgttgagaatacagtgaatgagtcctatttataactgaattaaaagcttaattaagtttatgagtgttttaaaactgtataaagttaatgctaatgtatttattaaaagtaaaaattattaatacatttttcttctttgcaacaaagattaaaatgaaaaatgctttaaaatgattgaatgaatacataatcaattatccattgcttgctgactttctgcctagcattata

SEQ ID NO: 597 - DNA, 485 bp, Homo sapiens
tatacatttgaaaatactgaaggatgtatgtggacattttcacacttgtcgaccatatcaagtggcatctacaataacttaaatatgtgaatatgtaacataatttaaaattccttattttttgggaagcataatgtgcctcttcattataataaaacatattttcactttccactgttaccataacagtagtatataattcatagagtgtttcagtatggcatagtgaaaggaacagtaagatttagacctgagttatgtcacagtttcaccactcaacttgcagtatggctttgaggagagttaatttaaatcattgcacctcattatcttcatgctgtaaaatggacagtaattttattataaggattttatcttgattcgttttaatatcttaagaatttcatatttatgagatatcaaattttagttatcctcttatctctgctctttactcctgacaaaaggctgtgatattgggatca

SEQ ID NO: 598 - DNA, 516 bp, Homo sapiens
agggtttgtacagatgatgtttcaccatgttggccaggctggtctcgaactcctgagctcaagtgatctgcccgtctcagcctcccaaagtgctgggattacaggcatgagccactgcgcccagtcaaattttaccatttgtttttatagagatttttaataaactaattatgtatcctatatatgtaagttttaaccgattagcttataacaaaattgccctattttgatttcttgaaatttgttaatgcaggttgcaaggaagtccaacattacattattctacttattttatttgcttcgattttcctaatcattaaaaacacattcaccaaatacaaggaacagaacattgtatacacaaaattcccaattgtagtttttaggttttcttccagaaatatcaaggctatgcggagtgtatttacggaaacatagtcataagaatggaattaccaccgagaaggcctggggctctccggcagaagatcgatatctcatatgcaccttttgtag

SEQ ID NO: 599 - DNA, 582 bp, Homo sapiens
gatcttcagctttgactgtgaagaccagctttgactctctgtgttgcagagatggtagtgcccactccagtgacgcttgtgaggattagttgagataataaatacaaaatgctgagcatcaaacctagagtagagaaaggtctcaacctggctaatgttatccagacatatctgaaacctcatgagtggcatggaatggcagtccctgcttgaaccatttacctcctttcctaacaccaacaatcacacacacctgacactgacctgaagcctctggcctgtcctcggaggcaatgactgggtagacaagatgcctggttaccagcaatcttctgcaatttcctctgagctattgagattgcttttctctttgctcaaattatgtgagaaacttttaaaaaagaatttaatgtgctcttttgatatttcaggtgttcattcaaaagcctatgttattctctgtctctctctctcttttcctagttgggtaatcaaaatggcacaatcagaaatatttatatctgcaacagaaaagaagaataaatttattcatgcacaagtacattatgtacatatatatgt

SEQ ID NO: 600 - DNA, 467 bp, Homo sapiens
agaagggtaatatgtgccagctatgacatggtatatactaagattagtaaaacaagacaccattctcaaagagataatttcaagtgagggggagaataatataaaatatatcaatatttaagacaggcgaaaacattataaatgctattataaaatacttattgggtgaaggaagtgtctggaaagacatcatgcaagtgacagcatttgagataagtcttttttttttgacacggagtcttgctctgttgcccaggctggagtgcagtggtgcgatctcagctcaatgcaacctccaccacagctgttcaagtgattctcctgcctcagcctcccaagtagctgggattacaggtgtgcaccaccataccaggctaatttttgtattttagtaaagacagggtttcaccatgttggccaggctggtctcgaactcctgactcaagtgatccacccgccttggcctc

SEQ ID NO: 601 - DNA, 515 bp, Homo sapiens
ggggtaaaagagttagaggaagagaagcaaggtaagacaaggtgacacacagaatcagaaatgatgaacaggaagcaacttttaaaataaatgttttctgagtagctactaatatgccaagccctgtgctgggcattgacattgcagcagtgaacaaaacagacacgatcctggctctcgtcaagtttatattttataggaaatagatgataaagaagtaaaataaaataatgtcagatggcgatgagttcctggaaagaaatgaaacaggttaatatgatagagactggcccaggatggctagaagaggggtagaagtcaatgggggagtgttcaaggcaggaaacagttttaggcagagctcctaagccagtgccttccgggacagcaagaaggcccaaagtgttgctggagaggagtgacaagggacagtaataggaaaagagggcagtgcagttcctagaggccaactcatgcaaactcttgatgtagtctgtgtggtggtgagttttgat

SEQ ID NO: 602 - DNA, 537 bp, Homo sapiens
cctacggctgcgagaagacgacgaggggtattcagttttgtaataagagggttgttcaaggcatcagtctgccactctgctagaaacagaattctcccaggcattttttttatataaagtagttaatgaaattttgaaccatcttacatgaatttttattaaaatacacttcaggatgtggtgcccattatccattctactcttttgtaacaagtagatttctctgaattcttgaatttgaaaacaattggggttcctaaacagagaatatggaatattattggggatgatgtctttaataatacatttcaagataggagaaactttttctatatagttgactttaataaaagcctagggcaaaactttcaatatattaacagtatttatgaggcagttaagaatttgggtcatctccgtctccactaaaaatacaaaaaattagccaggtgtggcggcgggcgcctgtagtccctgctacttgggaggctgaggcaggagaatggtgtgaacccaggaggcggaggttgcagtgag

SEQ ID NO: 603 - DNA, 609 bp, Homo sapiens
ggtacccttctcccttacaaaaaaaggctttaagtcactgcaagaggggcagcaaaccgtggcacctcccagggcactggtgaagacccaatgtggctggagatgggcaaaaggaaaaaccaagactctgcccttgggggaggggcaggaaactgtccctgggccctgactactagagattctcagtgctacagaagggacatgaaactcctgcacaagagttaccatccacgcagtttggctgccactcaaaggagggcaggatcaatgaaaaagccctacccagacccagcaacatggagcctgcagaagactgcagctagacaacacaacagagaaccccaaaccctccctaccaagctactaaaccaaagtaacagataacagcagagtcgatcactggcacaggggcaagagtgtgcagacaaaactcctccaaggttcagacctacgaggaagaccaaaaggtggaggtggagcaggaacactgagaaaaaacctctggaaactcagcccctccactgaacgcaagctaacactacaataatatgaaaccagtggtcactcaaggtaatcagatcaacacccgaacccaaaccagaccaacga

SEQ ID NO: 604 - DNA, 456 bp, Homo sapiens
gggacaaactgaactgacaagagaaagattaccagggtcaaaaggtttattacgaatgcacatggatgcctcgaagaaaatatgcaaagatccaagaattaatacactttttttttttcaaagattcaggtacagactggaatatataccattttaacaaagagtgataagttgtagagtagtgacaagacaaaggaaaaaggtttgggcttctaaaaacaataaaattgtgggaaggtaaatatatgcaaaaaactaatggaatgtaatggttatttagtaaggattgtaaaggaaactgttcctgcatctgctgtttctcaattgcctttagctcaaaataatctgcatgccaataatatattgtggggtgacatacctgatctccttcactagattgtatgctgctttgcaacaatatatacagaacctcacttttttacattctctctacta

SEQ ID NO: 605 - DNA, 587 bp, Homo sapiens
tacggctgcgagaagagacagagggggattgcaatccccttctggctgtctacagagttcatactcttcacaccacagctgggctgctaagggccaaatcctagctctgccttttaccggctttgcaaccttgggcaagttccttcagctctctagactcagtttcctaatctataaaatgggtttataatattactacagagtagtgataaagaatacatgggttagtgtacgcaaaatgctggagacaattaacatatgtgaatcctgtgacctgatacgcacccagcaaacccagcaccctccagctccaccatgccaacacagaagatgctcctctagcccagcaggagaagtcagctgcattgaggcttgaagggtgaataagaattatctgggtaggaaaaggagaacagcctcactggcagagtttttataaaggcaccaaagtctgaaaggcatgaagagtttagagggacccgttaacagtttagaacaactggatgacaattgcgtaaaaggaaatggatactgcggataccacggagctcagcaagcaagtttcaccttctaaaggcagtgggtga

SEQ ID NO: 606 - DNA, 540 bp, Homo sapiens
agaagacgacagagggtcctcccagattctggtctgcaatattgcaatatttgaaatttttcttttttttttccactcatttttctcctccaatctagtcagtaaaaaatcttactaaatcctggcaacctccatttttttaaactcatttttgctccaaccaagtcagttaaaaatcttaccaaattttagccactggcctctgttctgaggactcctatgagttctgtacttctataaagtcttcacattttgtggggcaagactctgacagggacttctaggcagatgcacttttaaatacaagtcatggtttctgtctaacagtatattacacattaaaacaatcatgagatacactatacaactattagaatggctaatatctaaaaaacctgacagtaacagttactgtcgaggatacagcacaacaggccctctcattcactgctgatgggaatgcaaaatggtatagccattctggaagactgtttggcagctgctttagtatacaactaaatatagccttactatgctatc

SEQ ID NO: 607 - DNA, 541 bp, Homo sapiens
acagaggggtggcatttatctttatctactactgtacatttccacaggtaaatgtggtataagactcaaaattaatattttataccgccttgaccgctgatgaaattgggagagcctcaaattgcctaatcacaagtttccccccaccactgtgatcctgtgcataaagtcttctaaccaaacaactcaccatatcaaaaagaccaaatgcagttcctgcttatgcttgagtagtgggcttcatttccctggcagcccacagtatttaaacaagccaatcacattcttctttgggaaccagggggccctcaccttcttgatactccaaaacctgcctcccacagcccctgattgttcactctgtccttgagtgcaactggagatatagagatacagatatagatatgaatagatatagactattcattcttaggaatataataagcaacacgtgttttaaaggaacatttttggtgaaaccaatttccgtagatgtataactaataaatcctaggtatttagtgagtaattacagatttag

SEQ ID NO: 608 - DNA, 529 bp, Homo sapiens
gcactgactctcttgactctttgtggctcaaccttctgattctccctattcagctgggagacattccccacaacagtgacacctgtatacttcaattaaggccactttgcacatactgagtaaacactccctaaattgggctaagaagaatgcacaaagtcacaaagtcctccaaactatgtgttagttacaaagagaataatattaactttacagtggagaaatccagcagacaccacctgtgttagtttcttatgactgctataacaaagtaccacaagctaggtggcttaaaacaacaaaaaatttttgtcttattctggaggctaagtctgaaatgaaaatgtcagcagaggccgggtgtggtggctcacacctgtaatcccagcactttggcaggccaaggcaggtggatcacctgaggtcaggagttgagaccagcctggccaacattcggtgaaaccctgtctttactaaaaatacaaaaattagccgggtatggtggtgtactcctgtagtcccagctact

SEQ ID NO: 609 - DNA, 366 bp, Homo sapiens
gctattgcttaataatataatccaataattgatgttacattcttcatcatgttagggtgttgtaaaaataaaagaacaaagttctgaaatttgtttttgcctctattccagaaggaaagattagctataagctaatcaagaaggcagataagaatattttaaaataagagtattttaaatttcatagtgggttatgttgaagttaaatatcaaatattaaattagaatctattgattcttttaataaggttgctgaatttattacaataaattttaagaatctattaaaatattcttttttttttttttttttttgaacaaaaatttttgttttgccccccaggttgaacctaaggggaaaatttg

SEQ ID NO: 610 - DNA, 602 bp, Homo sapiens
gacatcatatgcggttaccaaatttgacaattattttcatcagattcagcatcaaaatataaatgcctactgttaacatgtattttggaagttttggacaaaatctgaaacagaaatcagaagcttttactatcagacaaaagctagaatggccatatttactttgacacagttacatatccatgaaattcaaaagaatcaactaatatccttctaaaattattgagagtttagtaaatgatcagatgtgagctatgcattaagaaattgttttcccagaatagagaactcagaaataagattgcacacctacaaccatctgatcttcaacaaacctgacaaaaacaagcaacagggaaggtattccgtatttaataaatggattgggagaactggctagccatacgcagaaaattgaaactagaccccttccttacaccttatacaaaaatcaattcaagatggattaaaaacttaaatgtaaaacccgaaactatataaaccctagaagaaaacctgggcaataccattcaggacataggtatgggcaaagatttcatgacgaaaacaccaaaaacaattgcaacaaaagcaaaaattga

SEQ ID NO: 611 - DNA, 525 bp, Homo sapiens
agaagggatagccaactgaacaataggaaacagcatgaagagaaaaacccagccaacagtttgacagtcacctccaatgactcagacttgtgattagaaccatctgagaccctccagcccctgacatgctgctgggtgactgcacccacataactaatcccagatcacagcagcagaagaaccacccagctgagccaagccaacacagagactcttaaaaaatacactaacttattgttttcaaccataaagttttgtgtcatttgctatgcagatataagtaactgaaacagaaattggtaccagaagtgaaatgtacccacaacaaaatttaaaacatgtggcattggctttggaaccccttagtaagcagaggcttggggaaaagtgaagggactgtcggaggctaagagaagggtaactatgttatattgtgatagaaatattagcgaaagtgtcatgtgcagtaacttgaaagatagaaattatacctaatgaactcatagatctggctaaaggaatcac

SEQ ID NO: 612 - DNA, 352 bp, Homo sapiens
catatcatattattattaatgaaattaatcaagagtgattacaataatattaccatgatagagagaaacattatttaatgataaaaagtacaattcaccaagaaaagtagcacttctaattatgtatgaatcaaacaatagagctgttaaatacatgaagcatacactgacgatgctgaaaagaaaaataggaaattacactattacagtggaaaactttaacatttctctctcagcagatgatatacaaattacgcctaaatctgcaatgataaaaaactcacacatgattaaccaaaaggatctgcatcacagtatacaatgaatactacacagtattttcaactgccta

SEQ ID NO: 613 - DNA, 517 bp, Homo sapiens
ggggtaggcagggctttcttctgagcagttggtaaatatggaataggattgagacagtggtcaagggtcccactgcattctccaagccaggcgttgaaaagtaatcatggctgggcatggtggctgtatgcctgagtcccagctctttgggaggctgaggcagaaggatcgcttgaggccaggagtttgaggctgcaatgagttatgatcgtgccactgcactccagcctggacaacatagggagaccctgtctcttaaaaaaaaaaaaccatggagattaattacacactcatttatacattggtttattaattttgcatcaattaaaatgatacatgggaccttattatacatttatttatttcatagatatttatttggcatttactctgtatgagcctagagagatgtttataatgccagatgtggcatgcgccaaaaagctggttataaactaggaggaaggaaggcaaatctctgccgttgaaggcaatattcacttgatatacatgaatg

SEQ ID NO: 614 - DNA, 521 bp, Homo sapiens
cgacagaagggacatgtatttatatttgtatgagtcatgattatatctcgttaaaaattatttaataccatacttagctatgttgttagaatatcttttgtttattacctagaggtgttgaagtacgtctgaaaatttattcttaagatggagaaataacaccttgatgaatgacatgtgtggtataaaaatattattatgtttatatggctatttaaagtttccacaaatattaaatatttataagactgatattgagaattgctaagtaactcaatggcaatgttgaaagtgtggttcagttctaatttttttaccacttatgtctctattaaacaatacaattggccaggcatggttgctcacgcctgtaatcccagcactttgggaggccgaggcaggcagatcacctgaggtcaggagttcaagaccagcctgactaacatggtgaaaccctatctctactaaatacaaaaaaattagctgggcatggtggcgcatgcctgtaatctgagttactt

SEQ ID NO: 615 - DNA, 533 bp, Homo sapiens
cgacagaggggtgctgggattacaagcataacccaccatgccttgcccagaagtcctttatgtggtataaccatcatcgtctatcttccttttagcttgtaactttttgctctagctccaatacaaaagactaattcgtcaatttggtagtcaatggcatttattgagtggcctcttgggtgaaacactgtagagaaaatgctgtatacaaccctcagtccttgctctttaggaatttagtagtgtggttagggaaaagagatacaggagaaaactaggggccaggcacaatggctcccgcctgtaatcccagcactttggaaagccaagttgggcagattacctgaggtcaggagtttgagaccagcctggccaacatggtgaaaccccatctctactaaaaacacaaaataattagccaggcttggtggtgagtgcctgtaatcccagctactcaggagcctgaggcaggacacttgcttgaactcaggaagcagaggttgaagtgagtcaagatcacgccattgcactcc

SEQ ID NO: 616 - DNA, 509 bp, Homo sapiens
aagtgattggatcatgggagtggatttcccccttgctattcttgtgatagtgagttctcacgagatgttgtttaaaagtgtgcagcacttcccccttcagtctcttcctcctgctcctgttatgtaagacagcgtgctggcttcccctccttctgccatgattgtaagtttcctgaggcatccccaaacatgcttcctatacagcctgtggaactgtgagtcaattaagcctcttttcttcacaaattacccagtctcaggtgtgtcttcatagcagtgtgagaacagactaatacagacattatctctagtgagagtgtgagaggccacagaaggcaataagtgatagcagtgatggttttcagtagcatgatgatagaagctgattaaggaagattcccagctacctcagtacacagtgccttgttgagttaaagaaatggggccaccaggcatggtggctcatgcctgtaatcccagcactttgggaggccgaggtgggcggatca

SEQ ID NO: 617 - DNA, 674 bp, Homo sapiens
acgacgaggggcctgattgacagttcccacgaccccgcccccggccctgattggatagtgcgacagatcccgccccctgacgactgagttacagaagcgatctcacgctggggagtggagactgatgaacgagttcttgacacagcccttgggcagggcgggcttcttccctgcgctgtgacctgacccctcccaggggacatctgcatttaagcaggatcccccatctgtactcagtgtgaccttcctgctttttcctcctagactggggatcacaagtgtgtgcagggaaacccagacacattgtccagtggagccattccctggcctcggagtaggaggagagccgaggccatacgggtcacactgcaacaagaataagggcttaggctgggcgtgatagctcataaccgtaatcctaacactttgggaggccgaggccggtgcattgcttgagcccaggagttcgagaccatcctggacaacatagtgagagcctgtctctacaaaaaaatacaaaaattagccggaatggtggcctgcacctgtagtcctagctactcggaaggctgaggtgggaggatcacttgagcctgggaggtcaaggctgcagtgagtcaagatcgtgccactgcactccagcctgggcgacagagtgagacaccatctcaaaa

SEQ ID NO: 618 - DNA, 533 bp, Homo sapiens
gacagaagggcatcaagtacaaagacttataagtagtgagagctcaagaaggtattggccaggcgcggtggctcacgcctgcaatcccagcactttgggaggctgaggcgggcagatcatgaggccaggagattgagaccatcctggctaacacggtgaaaccccgtctctactaaaaaaatacaaaaaaattagccgggcatggtggcgggcgcgcctgtagtcccagccactcgggaggctgaggcaggagaatggcatgaacccaggaggtggagcttgcagtgagccaagatcgcaccactgcactccagcctgggcgacagagccagactctgtctcaaaaaataaataaataaataaataaaaaaggaagtatttactactaacagttggtcaatattttagttaactatatgctaacatctacactactcagattataaattgtaaaacgatcagaatattagcgcgcgcgcgcgcgcgcacacacacacacacacacacacacacacacacacacacacacctgt

SEQ ID NO: 619 - DNA, 563 bp, Homo sapiens
cgacagaagggtgaaacatgactaaagagcttaaaatgcctattctcaggcacatttatggtgtgtcagctatccacctccatgagcatcgtatgctcaggagctcttatcaatacagagaacatggcaaagaaaactccctgaatagaaatctcaatatctgtcacatattcttcattcagtcatttcatgttttataaaatgccaaaatatgaaatattaagtcatattttataacatgattgaatcacttgttatccagagtttaaaatctcatagacctctaatcaatgagtcagtgatgacaatgttacttatattttagacagagattctcaggttttttttttcttttttctgcctcaacagcaagtctttcaaaacagtggctgtcaggtttccaatggtggtaattctcctggagaggaagtgggtttgggtagactgaggcagctccagaggtcatgcagtttgaaaaagcctccttcaataaagtgaataaagatccctaaagacatgcaggtctcaatccctggaaccttgtaatgttacctgatatagca

SEQ ID NO: 620 - DNA, 612 bp, Homo sapiens
gacctcccttctttctttctaccataactgtcccacaggcagtctagcaaaagattgattgttgaaaaaaagaaaaaacaataaagttaaataataaagtccaaataaaccaaaatagacttatctttccccaacaacagatttctgggttcataattcctcctcattctactatgagtcgcattgagggatgctcacagcagggggatgctggcaaccacccagctctctccatagcatgtttaccaacactaagttgtacttactttaagccctaatttgcctgaataaccattgtgaagataaaaaaaaactaatgtaaaacaaagatggttgtttttaaaaaaatgatgttgaaatgtttaacattagataaatgtaagtatgtcatttaaaattgctttaaaaatagttgtggacaagacaacaataagggattgggtggattaattgtaaacatctcataaatccagcacccaggatataatttgcttcacaaatattatatctttattccctttaaaaattgaaactggaggccgggcgtggtggcttacacgtgtaatcccagcactttgggaggccgaggtgggcagatcacaaggtcaggag

SEQ ID NO: 621 - DNA, 473 bp, Homo sapiens
ggggtattctgcacggactgctgggcagcactagcactctggagaaggtctgccgctgtctgcactttcctggtgagaatccccaatgacagtcccacttttcagtggaggagaacaaaatatctgtctactctcttgaagaaggacacggctttgatcatatttgttcaggcttgacttggccggaggttttaggttcttagtctcaagtcagcagtctctctctctctctctctctctctctgaaacacacacacacagagactcacacacacacaagcacacacatacacaagcgcaaatcctctctttctctttctctcatttcccgtcataggttctatgcaggcagatgagtgtcacagctgtcactgaggcacagagcagcacacacagtggagccgatttccgcgatggcgagagggggcaccggaggtgacaacaataacaagactgtccttcggacaagtttt

SEQ ID NO: 622 - DNA, 557 bp, Homo sapiens
agtgagaaggtactctaaaattctgggagtcatgcacatgctctccagagtctaatttagcaatatgtcaatgaattataaaaaggtgcatgctttttaacttttattgaaataaaacagtttaaaactttttattgaaacatatgtctggaaaagggctcaatgtataagcacaaactagatgagtgtagggcccagaattgagtgacagcacccagatgaagatgagttattatttccagtacctcagagtcctccccatgggctccccagaaactgctgttccccgagagtcaccacaccgctgactgccataaacttagactggctttgcctgtttttgtacttcatatgaaaggaatattaatgtatgctccattttgtgtctggctgtttttgttcaatataatctttgagattcacctcgtactttatggggatgaggagatcatgtgtttacacagcagaatcatattacattatgtgccaagggctctgatggtgtgctcacagggatgcataccaatctgtatgctcttcaatgtgtgagcaatttg

SEQ ID NO: 623 - DNA, 518 bp, Homo sapiens
acgacagaagggactatctatgttggccatgctggtctcaaactcctgaccttgtgatccgcccgccttggcctcccaaaacgttgggattacaggcgtgagccaccgcatccggcccaccttcctgtttgactcaacttttttttgacaaatgtccaaggtaggaggtgagtgaagatatgtgagctctgaggtcagataaaggaaagctctgtgtgagtggagttttccagggaactgcaggacaggtcaaatgctgacagttaactgggaatgggcttgcaaggagctccatccccattctgttgctctttcacagaagattaatttgggtcgggtgccgtggttcatgcctgtaatcccagcactttgggaggctgaggcaggtagatcacttgagctcgggagttcgagaccagtctgggcaacatggtgaagccctgtctctgcgaaaaatggaaaaattagcctggcgtggtggcgggtgcctgtgatcccagctacttgggaggcctcat

SEQ ID NO: 624 - DNA, 316 bp, Homo sapiens
agaagggtacctcggcctccgagtagctgggactacaggcccgtgccaccatgctcagataatttttgtattttattttattcttcctgccagacgggataactgtcttgttgcctacgctgccctagaactcctaggctcaagtggcccacccgccttggcctcccaaagtactgggattaataggggtgaaccacccactctcctcttgaacattttaatcacagtaatgcagaactttgaggatactagcaaacaatggctagtgagtttcatatatcatttacttcttatcagctacaattaatggtaacag

SEQ ID NO: 625 - DNA, 357 bp, Homo sapiens
ggccagcaagctcatctgcaatcaggaacaccctcagtttgcagcggggcttagagagggtgccagcagtgttagaaccacagctgagctcagtttttgcaggcataaattcttatagtccagaataacgccaagagtaatgtaaggtagggaaacaggccaggtgtggcggctcatgccggtaatcgcagcacattaagaggccaaggtgggtggattgcttgaaccaggacttagagaccagcctaggcaacatggcaaaagcccactctacaaaaatacaaaaagtaggccaggtgtggtggctcacgcctgtaatcccagcactttgggaggccaaggcaggtggatcacctg

SEQ ID NO: 626 - DNA, 595 bp, Homo sapiens
gggtccaaagtaggagatcattgttacccagaggaaggaaaacttgaagctggatgtggaaaactgatgatgaggttgccttttgccttgaagccatttgggtttttataagtcacttagtgtagacagtctcacctagcatcttccagttggggaaaaaaatgagaaggatctgattagaaaatggaagaacacatacatacttttgaaactcattttctccaatttgtcatgtcatgtaataaaacctggaaattactttttcaaaaatatgtcataattatatgaaaaggcaagaaacaactacactttgaaaacacaacacagtcctgggactacaggcatgtgcctccatgcccggctaagttttgtatttttggtagagtcggggttagcttccctagctgcggagggtttctgagaaaagcagcacagttatccgtagccggtccagtataaaggcactcgcattagtggcaggttcctgagagctacatttgtcagcaagagtttcatggaggagaaagggcgaaggctgagatcctggtaggtggaggcaagcagggactgaggaccttcatgacaggtggatgga

SEQ ID NO: 627 - DNA, 436 bp, Homo sapiens
tatgcctttgtgcctatatacatgcgcacacacacacacaaaggagggtgcatatatgtgtgcatacacacacacacacacacacacacggagagagagacagtatggtccagaaaaggccactgataaagctgcagaaaactgtatcttaaactatttgttatgaaaatataccacaacaaatagacaaatagtctctaaagatcgttaataaatactttgcgtttaaacacataagagggtttgggaggtataattagcagggtaaagccatgaggaatattatatttgggttgaaatgaggtgtgactttgaagcaatagttttttttctctatagatgtagttttgaaaaagcatgataaaaatgaatttcttacccccaaactaaataaataaatatttcagttactgtaatataattatttacacttgac

SEQ ID NO: 628 - DNA, 522 bp, Homo sapiens
ggcatccataatggtagctaggaaaactagatgacactatctatgtgaaatgctttgaaaatttcagacagtttccaaaaaacgagttagctattagagtaaaaagccagtgtcatagtcaatctaacttgtactttaaaataaagaataacctcagtacaactgggagccttggacttggcagccaaatgcatataactgggaagttgggataatgaagggaaacagaatgagactttgtataaaactgtcatttggaaatgatgcatgttattcctgcaatttaaggaggaaatttttaattaaaaaaatacttgtaggccgggcacggtggctcatgtgtgtaatcccagcacttttggaggctagggcaggcggatcacgaggtcaggagtttgagaccagcctgaccaatgtggtgaaaccccgtctctactaaaaatacaaaaattagccagacgtggtggcacgcacctgtagtcccagctactcgggaggctgaggcaggagaattaattgagg

SEQ ID NO: 629 - DNA, 572 bp, Homo sapiens
cttgaactgtctaattctagttatcaaattctattttcatgttgtcattttctatttattttagctttgaaaaaaattgaaaacaagtttgggattcaaaaacattttttaaaataatttgttcacttactactgtaatataatatttactaccatgtgaagttatgctgatttagatatttgtaagtaaagtagtatttgaatcctataggaagaaaattaatttaccttattaaaactacagataaaggccgagcatggtggcttgtgcctgtaatcctagcactttgggaggccaaggtgggcggatcagttgaggtcaggagttcgagaccagcctggccagcagggtgaaacctcatctctactaaaaatataaaaattatggccaggtgtggtggctcacgcctgtaataccagcactttgggaggctgaggcggacggatcacctgaagtcaggagttctagaccaacctgggcaacgtggtgaaacgccatctctactaaaaatataaaaatgttagctgggaatgctggtgcacgcctgtaattccaagtccttgggaggctg

SEQ ID NO: 630 - DNA, 624 bp, Homo sapiens
gaaaagagacataagttgagtatccctgatctgaaaatctgaaatgtgaaatgctacaaactctgaagtttttgggcacaaaacatgaaaaaacactaatctagaatcatcaacagtgattttcggatatcacattattgatgctgaaatgttaactataatacaaatattccaaaatccaaaaacgtctaaaatctgaaatgcttctggtcataagcatttccgacaagggatattccacctgtgataaatgcttcctggagccacagggagaagggagggaagggagcgcatggcctggcagaagcttcctctcctggctccaggaactgctaaattcagcgaaaagtaattttcctgcactcagtcccttctctttggccctgaggagcatctcgagaaatctaagcctctcaggatggacccactccaggacccgcaagcccctcctgatctgtaccccagagaccattaaacaagcatagagcagccctgagacaatgcaccctacagtactgtctgtgtgtgtggcttgggggattggtcgtaatccaggtgtccatcaatgggcaggagccacgagggagaaaggaaccagataggcataccacagtacagatagat

SEQ ID NO: 631 - DNA, 596 bp, Homo sapiens
taaatacctgaatggtcctgataaaggaagctgcaagaaatgtggagcctagtctgttaggcaggagggatgcctctaagttcttatttctgaccactggcctgagccatttgggtatagtatagaactggaaactctgtcaagagtagcggagccctgcttctggcatgagaaaattaaatgttcaaaatgaatgtggaagcaacataaaattaaagaattcactacaataagaaagatagaaaataattgaattgtgtgtttaacttaagaaaatagaataataaccgcagagtaagtgcactgaaaatagaaagaaagattaaagagcagaaattaatgacagaggcaagcaacaagaataagaactatttacttgaaaagtcaaaccaggaaaaaatgagagtaagcataaacaaaatactaggtatgaaaaaaagggacttaaaactacagattaagaagagatttttaaagtaataagataattattaaataatactaagcaaataataaattaataaattatttcaaaataaacaatgaaatatccatgtctttatgctaataaaatccaaaatttaggtgaaatggaa

SEQ ID NO: 632 - DNA, 524 bp, Homo sapiens
acagagggcgtggtggcacaggcctgtaatcccagctactcgggaggctgagggaggagaatcacttgaactcaggaggggtagtttgcagtgagcggagatcgcgccgttgcactccagcgtgagcaacaacaacaaaatatgattgaacaacttaacatttttctccccaaaaaagtagagtaacaaattaactctatagtctagtgtacagtaaataaatgaaaaacaaagatattgagtcatttattttagctgcacaattgggaataaaacacttcttgggctacaggccaagagctttcaaatatgttagcttatagaatgtggggagacctggtatagaaacattcacccctcgtgccaggcgtggtggctcatgcctgtaatcccagcactttcggaggccaagacaggcgttatcacttgaggttaggagtttgagaccagcctggctaacatagtgaaaccctgtctctactaaaaatacaaaaattagccgggtgtggtggcaggtgcctgta

SEQ ID NO: 633 - DNA, 628 bp, Homo sapiens
ggtactgttgactaaataatgtgcagtggcaaagaaatccagatacgactgttgtccaatttcaatttcatacatattttgccttacatttaagacataaatatgtcttttctttcacatcctttgatattatttgctttcaaataatagttgtaaaactaaaagtgtccctgttttttaattctatagctacagaaacattttcagttatttctcacaatcttcagagggagaaagtttgcattttctttctgtaaccattaataaccatgagttttctgttgttattgaatttctcattttcctaattccttatttaaaaagttgaggttctgataatttagtgacttgtcaggctaagacaaagatgaagatggaggccaggtgtggtggctcacacctgtaaccccagcactttgggaggctgaggtgggaggatcacttgaacccaggagtttgagaccggcctaggctacatggtgaaaccccatctctacaaaaaatagaaattagctagctatggtggcacctgcctgtggtcccagatactcaggaggctgaggaaggaggattgcttgaacccaggaggtcgaggctgcagtgaactgtgattgtgccattgcactcg

SEQ ID NO: 634 - DNA, 500 bp, Homo sapiens
caatgtactccaaagtcatgttttcagtgttctctcctttgtatctattccccaagcagtataatgtctggcacatcgtaagtgctaaataaatattatttcagagttattcttattatgtaaatttatagctaactcttattctgaactgtactttcctgtacatgcccccagtgaagtttagtcataatttcccattttttcaatttataaaagtaccttcagcctgggcatggtggctcacacctgtaatcccagcactttgggaggcccaggtgggcagatcaccagaggtcaggagttcaagaccagcctggccaacatggtgaaaccccgtctctactaaaaatgcaaaaaattagccagtagtggtggcacgtgcctgtagtcccagctactcaagaggctgaggtgggaaattgaacctgggaagcagaggttgcagtgagccaagattgcgccactgcactccacctgggtgacagagtgagactccctct

SEQ ID NO: 635 - DNA, 556 bp, Homo sapiens
acagagggggaggcttagaggtgggtcccaggaagagaccctccagagagcagggagggctcgcagttgcattttgagaatccaaaataaatagagctagactagagggttctgtgtggctcaatggaatgagcaaggattctggagtcaggtggacctgggttgaaatcttggcttctcagagcaatggatggtcttttcccatcttcatagcctacacttgattaaggtgtaataaaacccaaagggagggattgaaaccgtctttgcaaaaatatgactgagacagtgaaagagatctaacttaactgactccatcttgcttccaacctccaagctgtccttgttcattcctgggtgtaggctgaactgactttgggagaaacttacagtttatagtttaaacaaagatggtaacagcactttcccaaagcagacctccttcttgcctggggactagattgcctttgtaggactaacattagccacaagattagaaattatgttttaggaatcatgcagctgggggctacaacattctgatcctccctaaact

SEQ ID NO: 636 - DNA, 598 bp, Homo sapiens
gggggattatgaagtgccttttgctattgtagttatgttattctagtgtctattactgttcatatatcttttcattcagaattcagaatacagagctgaaaacttctccctgtaacatataagttatgacttctctccagagcatataagcttttactatgagtaaaattcagtcctcagcaatatagaagtataaaactttgtccttaatttctaattacttccatttaactgagcaaacattttaaatggtaacactttctttatgccctccagtctcatgctgtccattaaaagccttagcactttcagcattatgaacccacagacgaggccttgacttccttcttaggaagagtgagatgttaaagacacagactggctacctgctgtaaacatgtattgcctttttctttatctatcaaaagcgtcaagaaactcttagctatttgagctcactcttgcaaggcactatgctaataccatggggatattcaaggatgtggttcttgtcttttagaagtttacaatccaggctgggcgcggtggctcacgcctgtaatcccagcactttgggaggccgaggcgggcggatcac

SEQ ID NO: 637 - DNA, 596 bp, Homo sapiens
gataacaaccacatcttcagtgcagttgcttggttgttttagaaggggattaagccctctttctctaagacagtgattctcaatagggggaagggggcatttttgcctcctgggacaaatttggcaatggctggagacatttttggttgtcacactggggtggggtgtgtgctattattgtgtacaggtagaggccaggtatgctgccaaggctcctgcattgcacagggccgtcctctacaacaaaggactctccagccccaaacgtcagtagtgctgaggttgaaaaaccccggttgaaggcattgatgtgaaaagggaccttagttaatctttataatggggtctaaatgagaaaatccctgatctcattgtaatgccatatttctccttccccaggaattgattcgtattctgaaaaagtaggttgagaattcagatttttacctcatccacttatacaacaggtttgatcaaaaaaacagtttctacctgtttacatttgacataccctgctgccttacgttattgccaaatgttgttaataattgtttaaaaattgcccattaagatgtcaccataagcctggggcaatg

SEQ ID NO: 638 - DNA, 516 bp, Homo sapiens
gaaggggtacaacatcgtgctatagtacttttcttcttgtgatgagtgagtttgggtatcttcatctagttaaataccattttttggtttgttttttgatattgtatttcttttttaacttttattttaagttcaggggtacaaatgcaggtttgttatataggtaaacatgtgtcatgggggtttgttgtacagattatttcatcacccaggtataaagcctagtactcattggttatttttcctgaccctttgcctcctccaacccttcaccttccaagaggccccagtgtgtcttcttcccctctatgtgtccgtgtattctcatcagttaaatgccatttatatttccttttatatcaatatcccttgactatttttcttttggatgattgattttccttttgctataagtttttagaagcttttttctatgtattttaacatttctgtctgtgatattttgtgtgtgaaaaaaaacacactcaatgtgttttttcctatttttctcacttg

SEQ ID NO: 639 - DNA, 535 bp, Homo sapiens
gggagagggtctgagctcactaaattcccttccaaagcctcagcaaccacccccttgaagaagtgaccagagagagctgcttgccccgacctcttgccgttccttgcaagataggagttgcccctctacactaccaaaaacccactggccctggacagggctcaaggagagaggtggctgatttccaggagaagttcgatactagacataacagtaacggcagctggcattatggggactttgctatttcccagacggttgtactaagcactttacctatatattcttttcgtttatacctaaaaacagccaaattagaaagaaactactattgtcatctcacgagttaggaaaccaaagtccagagggattaaattgcccaaggtgaggagactgtaatcccagcactttgggaggccgaggcgagtggatcacctggggccgggagttcgagaccagcctggccaacatggtgcatggtctctactgaaaatataaaagttggctgtgcatggtggtgtgtgcctgtaatctc

SEQ ID NO: 640 - DNA, 475 bp, Homo sapiens
ccatctcacaccagtcagaatggccattatcaaaaagtcaaaaaataaggctgggtgcggtggctcacgcctgtaatcccagcactttgggaggccaaggcgggtggatcacgaggtcaggagatcgagaccatcctggctaacacggtgaaaccccatctctactaaaaatacaaaaattctccaggcgtggtggcgggcacctgtagtcccagctactccggaggctgaggcaggagaatggcctaagcccgggaggcggagctcgcagcgagccaagatcgtgccactgcactccagcctgggcaacagagcaagactccgcctcaaaaaaaaaaaaaaaaaaaaaaatttttggaaaatgtaatggggccatccttccaccaaaaaaaaaaaaaagggcttccttcttgaaaaaaaaaaagaaaacctgtttttatttacaagggacttaattttaaaaaaaatttttaaa

SEQ ID NO: 641 - DNA, 642 bp, Homo sapiens
agaatttgtagtacatgatatccctcattgttaaaatatttaatacttaagcaattttagagaaaaagagcactttcctctaaattttcttagtcttcgttaatgcgtatagctttattaagaaaactgcaatcaatggatattttggactattctttgtcagctaacattctacatatacgtatcaaattcccacaaacttgctattttaaactgttaggtaatattcaatcattaacatggcgcagattatttagctactctcttgctgtctacctactatttatctttaaaaaaaaaaaactgatttggccgggcgtgggggctgacatctgtaatcccagcactttgggaggccaaggtgggtggatcacaaggtcaagagattgagaccaccctagccaacatggggaaaccccatctctactaaaaatacaaaaattagccgggtgtagccgggcgcggtggctcacgcctgtaatcccagcactttgggaggccgaggcggatggatcacgaggtcaggagatcgagaccatcctggctaacacggtgaaaccctgtctctactaaaaatacaaaaaattagcccggcgaggtggcgggcgcctgttagtcccagctactcgggaggctgaggca

SEQ ID NO: 642 - DNA, 405 bp, Homo sapiens
gcagggccgggcgtggtggcatgcacctgtagtcccagctactcaggaggctgaggcaggagaattgcttgaacctgggaggtggaggttgtagtgagccgagattgccccactgcacttcagcctgggtggcagagggagactccatctcaaaaaaaaaaaaaaaaaaaccaatttgtttgttcttttttgaaccaaaccattacctccggggccccaaagggtagaaaaaaaaatcttttccttcctttaaaaatttttcctgccaaaaaactcgggaaaatccttggtttttaactttatgaaattcccacatttctccaatttttatttaatccccccctatctttgtctaatttaaacaaaacaaaaaactgaggttaaaaaaaataaaatatttaaggg

SEQ ID NO: 643 - DNA, 519 bp, Homo sapiens
  misc_feature 474: n = A,T,C or G
gcaccactgcacacccatccggtaccatcactgcacacccatcccgtgacaccactcacaccgatcccgtgacaccactgcacacccatcccgagacaccactcacacccatcccgagacaccactgcacacccatcccgtgacaccactcacacccatcccgagacaccactcacacccatcccgtgacatcactacagaccctgcaatctgaaaaggataataagcgactacgacaaacatctacatacataaattttataacttggatgaaatagaccaattcctcaaaaaacacaaactaccacaactcacctggtatgaaataataatttaaatagccctataactagaaattgaatttgtcattttaaactccaaaaagaaatatccaggctcagatggtttcactggagaattctaagattaatttcccagaaaatagaagagaaggaaaagcatcaatttacgttntatttatttatttatttattttttgagacaggttctcactctctg

SEQ ID NO: 644 - DNA, 559 bp, Homo sapiens
gaggggtatatgcctttgagtttcagttttctcaaaattttctgattcatcattaatggagagaaagagcaagaacaagagagaaacatatgcaaacacatacacatgacacataggaatttaaaccaaagtaaaatactgtactaattaaactaactttctcatagtaataggattggccacatcctatattaaattacccagctctggatttttacctgtgatgcttaataattatgtgccagagcaagaataaatgttaaaaagaagtgtgtggtttaactttcttttataactgattgccatttatttttgtcatagtagtataacctttaagtaacttttcctgagtacccactatgtgccaggcaaaaacatgggagacataggtatgtttaagctttcagggtgcctagtatgtgtgagaggtggcagccaacagattaaattgagaacatatatgagaaatttaattgtgtctggtacacagtatgtgcttattgagaaattagaaacctgccttcatcatcagtaccaccatcatcatcatcacccagca

SEQ ID NO: 645 - DNA, 606 bp, Homo sapiens
gagaaccagcagacggaaacatattcacatgtgtgtgaatgggtgagattatataaggagagcttgctgagcaaaacgagagagggtcatgcagaggactctgggacactccaacatttaaagggcacactcgggaaaagagccatttaagaacagtttcaaaaggagagatagccacaagaggtcaagctgagatgagcaggaatacgaagccattggaacagagtgagaccctgtctcaaacaaacaaaaacaacaacaaaactttttcaaaagaatttgttgtaagatttttaaaaataccaagcacttttcagtatgtgtgtgtgtagcgggggtaaatatatacataacataaactttaccatttaatcattcttgagtggtttttttggcattaagtacattcacattgttgtgcaaccattaccaccatacatctccagaaccttttcactttccatgattgaaactctggctgggcgtggtggctcacgcctgtaatcccagcactttgggaggccaaggcaggcagatcacgaggtcaggagttcaagaccaccctgaccaacatggtgaaaccctgtctctactaaaaatataaaa

SEQ ID NO: 646 - DNA, 415 bp, Homo sapiens
gacagaagggcccactccagaaaacagccaacccatgggacactacaaagagagggaagggggggtcaccttcaggcctcaggctccttcctccctctaatccccgccaacactcacactggccaagccaatctaaagctagaatgtgaggtagcctgttgaagtaggccaactgccagggcacagaacacagtgggaaaaggcaaagagtaggcctgagaaagcaaacagactgaccaaacatgaatttaagtaagaactgcagtgtcatgagatatctccagagtcagcaacaaaaggcaaagaaaggtatattcttccaaaagataagagcaggaggtggggagagagaaagtttgaattaaaacataataaaaattacaatttaagccgggcgcagtggctcacgcctgta

SEQ ID NO: 647 - DNA, 524 bp, Homo sapiens
ggggacagttttaccatctatctctaagttttggttagctgtaatagcctatattcttttttcttctgatgtaagttatggtaatgagacatctttcaaactgtttgaaattaactgtggattgaaaagtaaatcaaacatatcataaaaataaacattgtcagaagatattaccagcatttttcaagcagtaacggtttctgaagtaatatgattataaatcccttttatgccagtcagcctgaatatctccctccctctcctccctccctctccactctttctctgctttcctctctccctctctcgcttatctcactctgtctcgctcatgtccatatgcctcatacagtgtattgtagggctcacaattattttcaaggctatttccatcattttaatgatctgaatatttagaaacacctagaagtatgacatattacttaaatttgcagtagcgttttaatattcagatgatatttaaaataatagggctagtcattaaaaagaaacaaggttctttc

SEQ ID NO: 648 - DNA, 634 bp, Homo sapiens
  misc_feature 147, 531: n = A,T,C or G
gtacactccaacttaggtacacctccgccacggcatgaatcctacagagctgctaggtttgccaaaccttaaaatcagaagaggattagtgtccataccttggtgggctccaaaatccagagaagcaggggaaaagagagttcttanaaatacagggaaggggccaggtgcggtggctcatgcttgtaatcccagcgttttgggaggctgaggcagatggatcacttgaggtcaggagtttgagaccagcttggccaacatggtgaaaccttgtctctactaaaaatacaaaaaactagacaggtgtggtggcacatgcctgtaatcgcagctacaaaggaggctgaggcaggaaaatcgcctgaacccatgaggttgaggtttcaatgagccaagatcacgccactgcactccagcctggacagagcgagaccctgtctcaaaaaaagaaatatagggggctgggcatggtggctcacgcctgtaatcccagcacttggggaggcagaagcgggcggatcacgaagtcangagatcaagaccatcctggccaagatagtgaaaccccgtctctactaaaaatacaaaaattagctgggcatggcagcacacacctgtagtcccagctactcgg

SEQ ID NO: 649 - DNA, 292 bp, Homo sapiens
aattaaattcaacatgaaaaaatggtaatttgaaagaactaattggtgttttcatttgaagtatcttgcctgatgggaattgagttgaatttgtggattactttgacagtgtgatcatttttacaatattgattctacctatccatgaacgtgggatgtgtttccatttgtttgtgtcgtctatgatttctttcagcagtgttttgtagttttccttgtagaaaaaaccacctccttggttaggtatattcctaagttttttttttttttgcaccctttataaaaggggtgg

SEQ ID NO: 650 - DNA, 557 bp, Homo sapiens
  misc_feature 418: n = A,T,C or G
ggcagttcccctgcacacgctctcttgcctgctgccatgtgagacgtccctttgcccctcctccgtcttccgccatgattgcgaggcctccctagccatgtggagctgtaagtccatgaaacctatttcctttacaaattacccagtcctgggtatgtctttattggcagcatgagaacagactaatacgtgagcccacgctgctccaggccctgggattcagcaacagacgagaacaacccaaaatctatgttctcttgaacttacattctaattgggcggtggggaagatgtatatgaagttactacccacatgaagaattaactacatatgtaaagaatttctaatgttaggagaaaatgcttaagaaaacaggtttaattggccgggtgcggtggcttacgcctgtaatcccancactttgggaggccgaggcgggtggatcacaaggtcaggagattgagaccatcctggccaacatggtgaaaccccatctctactaaaaatacaaaaattagctgggtgtggtggtgggtgcctgtaatccccactactc

SEQ ID NO: 651 - DNA, 270 bp, Homo sapiens
attaatataactagatctaactcatctcaagttattacttttaatgcctatttccttataccttacggagattgacaagaccaaagtctctatagcaaaagtaaaatacctaaagcaaacaataacaattaagacagggtatcaggatgtaaatgcctggctaaaatggattaaatactccatctgcactccaaataaaagcaactgttacacttgtgcacacagtagaccagaggcccagattgtccctttttccactgggatggtcct

SEQ ID NO: 652 - DNA, 646 bp, Homo sapiens
ggtagcttttcacaggcttgatcgtagcgcactgcagccttgagctcctggactcaagtgatcctcctgcttcagcacctccccgagtaagtggtactataggtacttcaggttttgaagcatgtgtaaaaaatactctagcagggacatcatttgagctgagcaggccatggaggcatcaaatgattagcagtagggtacaacttgttgtgagaaccagaaaagagccttggcctacataacatcctgtgctaaagaaagaaccctgactcccagcctgtgagtgttccagagatgggcagagcagtccctgcagcgcttcaaggaacagggaagagcagctaacccctgatgcttctgtaagcactttgggacgccctttgctatagtagggtattgtcttagttatccctgacttgcctggtgttactttacgtcccttaatcctttcatgaagactggcaaacacattcagtcctgccaaccttgaaagtaggccatgtttgaaagaacattggcacaaacgagttgcgaacatttctttaccatattcatgttctttaccgtattatgaagacactgtgcttgccacatgggcagtcttgttttggggatacgtggttggatggacggttgggtggatgga

SEQ ID NO: 653 - DNA, 632 bp, Homo sapiens
agggactacatcaggtagggtatgggaatatttaggactactttggtaattattgaaaagtctagagtattaagccactggtggttttgtgaggcacgagtgagttgaacagtttggtgggctttggtgtatctttgctccaaaattatatcaccagttagctgttaggtgctgccatttggtaacgtgccaacttttcaaaaatggtttgccccaaactagatttttctatcttctccaaagccagagccaccttcctgtcctaatgcatttttagcagtgccccgtcatcttactggcattcacctgggcttcctgtgctcaatcaggggtcaagtctggcctgatctcagttccacagttcctctactctgtaagttcgagcacaattagcaagccttcgcacctccattttccttacttagcaactacatcaaacacccgagagtttatcatctctcttcatcctcaccctcctttttagtttttatgtatatgttacacattcatacacacaaacatacctgcatatatacatgtgttttatacgtcccacacaactgtgagctgcttacatacaagacagtcttttacatcattacgcatcactagatgtttaatgttgagtaatg

SEQ ID NO: 654 - DNA, 491 bp, Homo sapiens
aataataatatcagtaattagtttcttagagttagcacatgtgagagtcatctgtaatgctttctgattctcacagtaactctatagtattacatatccctattttacagacaaagatagtcaagaagattaagttctttactgtgtcaggaaaagagacttcaaacccaagttcgagaattagaactttttctgttatatgttactgactcattaaagtttaaatgtccttaaaatttcctaagaattgccctaagtagatgattctcatctcaccttctaggtacactgatttcctctataatatttagaaacaggtacattttgttttgttttaattttaaaacatccgagatgggcatggagaaggcaaaatgattatttaaaaaaattttttttgtctgcattccattttgagtctgctaattttattttcttccatgtgatgtcaaataaatattcacaggtaagttattgcaataaattattgc

SEQ ID NO: 655 - DNA, 505 bp, Homo sapiens
  misc_feature 309, 458: n = A,T,C or G
gggggcagaagggcggttgctgcagctttggccgaggttcgggctcgaacttggaaaatgctcctggcgcctcagggaaggtccttctcaagaaaagatggggctgaatcgctggaaacggttcacaaggaagccgagtcccaaggtgatcccaatcgaaagctttggagggcggggactttcccaaggcgcggcgcagtcaggaagccagtcgcggcccgtctgtgcttcctgcctcttcatcctgagctgacacgcccctgccttgaccgccccaaagccagcattaccctgagtgaaatgctctangagctctggggtctgggcacattacggctttggtgggcagcatcgtggaagaactttttgtaacgcttttctaaaaccggaggtgtctgctaatgcccatcggggtgaaaggagtttgcaaactccgttccccctaccttaaattttangaaacttctcgcacatttctttctttttctctctctttttttttttt

SEQ ID NO: 656 - DNA, 534 bp, Homo sapiens
gatggatatttataacagccttgccttctattgctaggctcagagatccttccaaacaagtgcatgattcttaaaattttccaaaggagttgctcatgacaaaataacactggtaagacttgcttttctttatatagttgtatcatgaagttagcacttacttttatcaaattcaaatggtcaatactgggcatcttccaagggtaggctgtattgctggcattgggcactccaaggatacaaatacgagatgaaattagagtgtttggatgaagccgaggtcaaggaactataccctgcaggccaaaaccagcctgcttccttttgttcatggcctgtgggataagaatagtttttatatctttaaatggttggaaaaaaataaaagaagaatatttcataatacatggaaattaagtgaatttctaatttcagtgtctataaacatagttttattggaatacagccatgttcactcatttatgtagtatccatggctactttcataccacagtggcagagtagatacaacag

SEQ ID NO: 657 - DNA, 557 bp, Homo sapiens
gcaggccaagtgtggaatagcacaccaatttaacataatgacaagtccagaaatcagagcacacacttcctcagaagtttccctttgggtactcacaagaaagcataggggttagaccaaggcccaaaggagctgttctcaatggcacagttttatgagacgtgtcagctgctgatgcaagatatacccaaacaccacccacttcctaaaactcttctctcacacattaaaaagactttcaaccacaaaagaaagggcatcgaaacttttgatatctaaggtcacttgtggagaagtaaaagcagaaattctgccttcccaaggttagaaaaatctctctttatctcaaggaaccaagtgaagaacagggttattgttgttgttagtgatcattatattttttggaagaagggtaaaagtgaaagccacctgtaactgggagatgagtgggaaaatttctcatgctcaagatctcccacagacatgagattgtattggccataatgagaaaatggatgaaggagttgaaaaggctcaatcttgaacccagcaagctc

SEQ ID NO: 658 - DNA, 383 bp, Homo sapiens
ggcgttgaggaaacacaccccttcccttcaagcattcttattccaatggaagatggggggagagtgaagccagataagttagaaaattccaacataatgcattagttatgtacaaattattcacttagataagaagtgactaattctgtcctatggattggagatgattttaataggaaggtgatagttccgttagaattaaggcagtggccaggtgtggtggctcacacctgtaatcccagcactttgggaggccaaggcgggcagatcacctgaggtcaggagttcgagaccagcctggtcaacatggcaaaaccctgtctctactaaaaatacaaaaatgagccgggtgtggtggcaggcacctgtagtcccaactactc

SEQ ID NO: 659 - DNA, 121 bp, Homo sapiens
cagaagggtgatggaagagtgtatgcgggggaggagcagggaatttttaaaagcattttccggtcacctcagactgggagatcatgttctttcctgaaaaaaaaaaaaaaaaaaaaacccc

SEQ ID NO: 660 - DNA, 302 bp, Homo sapiens
tctgacaattgcaatgaataaatacatatacactgtgaatactaggatatctgaattcctaggtcacagcttttcaggcattcatgtttgttgtaatatattagcaaacaattccaaaagctccaagaaaatattttatctaatgctgaagactagattaaggtcaagtgaactggaagggatttaagctagataaaggacaattattttctaagcttttaacaaatatttttgagtatctactaggtgccaaggagcacaacagtttctgaatatatgaattaagcaaaataatattcttt

SEQ ID NO: 661 - DNA, 582 bp, Homo sapiens
gatggatatttataacagccttgccttctattgctaggctcagagatccttccaaacaagtgcatgattcttaaaattttccaaaggagttgctcatgacaaaataacactggtaagacttgcttttctttatatagttgtatcatgaagttagcacttacttttatcaaattcaaatggtcaatactgggcatcttccaagggtaggctgtattgctggcattgggcactccaaggatacaaatacgagatgaaattagagtgtttggatgaagccgaggtcaaggaactataccctgcaggccaaaaccagcctgcttccttttgttcatggcctgtgggataagaatagtttttatatctttaaatggttggaaaaaaataaaagaagaatatttcataatacatggaaattaagtgaatttctaatttcagtgtctataaacatagttttattggaatacagccatgttcactcatttatgtagtatccatggctactttcataccacagtggcagagtagatacaacagataacatatggaccacagagcctgaaatgtgtactatttggccctttc

SEQ ID NO: 662 - DNA, 583 bp, Homo sapiens
agggatcatcaacatccaactcaaaaactttttcatcatcctacgactgaaactatgtactcattaaatgacagttctccattctcctccctctcgcccctggtaaccacaattctcctttctgtctccatgaatttgactattctaggtacttcttataagaggaatcatgcaatatttttccttttgtgtctggattatttcatttagcataatgtcttcagagttcatccaggttgtagcatgtgtcacaacttcattcttatttaaggctgaattgtatgtaccacattttgtttatctattcatctatctataagcacttgggttgcttggcaagttatttttaaaaagaatttaaagtactgtgtgagccaaacaaaacatttatcagctggctggatttagcacatgggctgctatttgatgtcaactgctctatatggaaaataaaattatacgtggatattattatgaactcattgctataggtcatagaaactttggaaatgcggaggataaagtaaccctggaaatcacaataaaatgacagacctctttctatttaaaggcttgactaatt

SEQ ID NO: 663 - DNA, 436 bp, Homo sapiens
gtctctctttctctctttctttcatctcattatgttgcccaggctggtcttgagctgctggcctcaagccatcctcctccctcagcttcccaaatactgggattacagccctgagccaccatgtcctgcctggaagcaattttctaataaaatgctgtagttctctctccttgaaattttttttaattgagatgaacacaaattcagacttctcattaaattttaaattaaacaaagctaggaagaaaattgagattcaaaactgcttcaataatttggaatacgccaaaaacattatggtgaaatttcaccatcccgcctttaagcttttaaaatccaaattggaggctggacacagcggctcatgcctgtaatcccagcactttgggaggctgaggtgggcggatcatgaggtcaggatatcgagaccatcctg

SEQ ID NO: 664 - DNA, 532 bp, Homo sapiens
gtctctaggtatacatatctgatcttcaatctatttattaactatatcctttttgtatggataggtgtatggaacactaagtggtcagtgacgtactcttgattaaatatttaaagaacatttaagtctctttaggattttgaatgttcccaccactaagaaatgataaatgcttgaagccatgtatatcctaattaccctgatttgatcattacacattttatacatgtatcaaaatattctatacccaataaatatgtgcaattattacatgtcaagtaaaaataattttaaaatgtagcttaactgtgtgttttccattcctaaatagctttatttaagaaatggtaacatcaatcaatgtaccatgtgatattcgagtcccttttaaaaaagaataaaagagagagacttatttttctagaatgtgatcttagaagattccatattggaaaccccatcaaacagaagtctaagcgcttaacataatgagcattcatccctttacttgtttattatctgacttcccacc

SEQ ID NO: 665 - DNA, 618 bp, Homo sapiens
ggtgatatggctgtaacatgattgatttcaacttttctctattgatgaacatttagggtacacccagttttcctgtatttcagataagaatgacctcacttattcattctcaagtgctttatttcttggcaaagccgttgatgtttagatgtgtaaggggtcttggttctcccttgtacctaagggatagagaattttcctgaaatattgattagaccattttaccaagatttgggggaagaaggactcagaaatgtcagttaaggtcaccactttatttttatcttattttgttttattttgagatgaagtctcgctctgttgcccaggttggagtgcagtggcacggtctcagctcactgcagcttccgcctcccaggttcaagcgattctcctgcctcagcttcccgattagctgggattacaggcacctgccaccatgcctggctaatttttgtctctaccaggaatttaaaaaaattggccgagcatggtggcatgctgtctgtcatcccggctactctggaggctgaggtgggaggattgcttgggcctgggagatcaaggctgcagtgagctctaatcatgccactgcattgcactccagtctgggcaaca

SEQ ID NO: 666 - DNA, 528 bp, Homo sapiens
ggcatgaaggtaaggacagagttattctccctaccttggctttttgaaaaatcattggtgatattataaattgctatatattttctcctagatattttgtcaataagttattaagcaattccattttcatgaatgtatcctagggaaataaacaatagtttgtaaaatatttagctctagtcctgttaattgtagcaacttcttgaaaagaaaaaacaaaatattcaaccattggggatttattgaattaattaaggttcatttacataatggactaccacataataagttaataagatagtacatattaaatgcttctcttttaatgaaaatatgtctataatggactgagtgtggttgctcatatctataatcctagcactttgggaaactgaggcgggcggatcattgaagccaggagttcaagatcagcctgggcaacatgacaaaaccatgtgtcgactgaaaatacaaaaattagctgggcgtggtggtgcatgcttgtaatcccagctacttgggtggctg

SEQ ID NO: 667 - DNA, 626 bp, Homo sapiens
ggttgaggcccggggctgttttctagttgttattttaggcttgtgtatatccaccaccatgccttaaaaaaaggcctcacattagtaagagctcagtaacatttgctgaatggatgaatgaagtatggtggctttgctatctcttactttacttgttcacttctctcctagcttcattcattcattcattcaacaattacatattgagagcctattatgtgccaggcactgtgctacgcatgtaggtttatcagcaagcaaaacaagatccctgcctaaatgtgccagcattctagattcttccttagactcaccatctttgcattcactttactcagctcttaaagaaacagtagacagttattgtaaatactattagctttatatttatgttgttcttctgtgattaaactttgctgccaagaacattatgctttcttggtagtttgcaacttgagtttctgattcttaaaattggttgcatatcccaatggctgtgatggtgttgaaaactctacttcttttctccccttgactgctgaaccaaatcattttccaagttgctctgaaatatggacaaaagactccttgatttcagccctatgtgcagcatggaaactttcact

SEQ ID NO: 668 - DNA, 530 bp, Homo sapiens
  misc_feature 247: n = A,T,C or G
gtgttttaattggtaattatattaggcagtttgcaagctggagtttttctgatttttaaaaaaatcagatgtcagtatacagatgccaatattaagttactaaattaatgattttcttttctagaatacaaaatacagttaaaataaaatgtcagcctcctgagtagctgagactacaggtgtgggctactgcacccagctagtttttgttttcttttttgagacagagtctcactctgttgcctangctggagtgcagtggtgcagtctcagttcactgcaacctctgccttctggcttcaagcaattctcatgcctcaacttccccagtagctgggattacaggcatggccccatgccaaactaatttttgtagttttggtagagacagggttttgccatgttggccagggtgatcttgaactcctggcctcaagtgatctccccacctcagccttccgaagtgctgggattataggcttgagccaccacaccctgccaagaatgaattttttttttttttttttaaa

SEQ ID NO: 669 - DNA, 578 bp, Homo sapiens
  misc_feature 531: n = A,T,C or G
gagggtccatacatctacacaccatctttgcaggtttgaatttcttgcaatatgcctccacaccctaataccttgctgaagttagtctcaggagcacgtccagtaacctttttacatctccaattcattgagtagctttgagttctttactttgaaggttctaaagttatttgcacagatggccatccatccgccttaaatgtctcatctcttgaatctctgtattatttctcctgttttttcccatctactacatttacatattctttctataaccatatataaaaaattatttcctataactacagatgccattctgtatttctagcctgtcataatttatttgaattaaattaattaactcacatatgactgtattctacaaaggctttgaaacatctggtttgtaaccacacagaaatacaaataaccatcagagactactatgaacacctctatgcacacaaactagaaaatgtagaagaaatggataaattccctgacccatacacccactcaggactgaatcangaagaaattgaaaccctgaacagaccaataacaagctccaaaactta

SEQ ID NO: 670 - DNA, 513 bp, Homo sapiens
gggcatattcttgaggtccttactaggtctcaattgctatgggtggcatcgggatatattaaccttcccatctgttgtggtgttcatgcctgaagtggatcccacttgagaagcacacagggcattcatgctggttgctaaatatttctcagcagaccacttccagagccttaccaaaaaattatctttcaggtgtgtctcttctgaaattgtacatggcatcgtcattactactattatgttacttataaaatgaaattaatcatagtgctgattttactgatagatatttggggctttctctactaagtgataaaagattgcttcaacaatacataccattttgttagaatagggctaatatggtgatcatgtgctgacttattttagtttggaatttcaaaggctagtagagtttatattatttacatctgtaggacttgaaaagtaagtatcatagtatatttaaaacaaggttctgggctgggcacagtggttcatgcctgtaatccc

SEQ ID NO: 671 - DNA, 631 bp, Homo sapiens
ggttctaggtagggcaatgacaaaaacaaaacaaaacaaaaagctagaaaacgtaaagcctttggtcttaaaaggctgtacacatgtccacatattccagttttgaatagaaatagtaaatgagaggaagagaaaaggacacatttggaatttcaggacattatgggcagattcacagagaggaatccaaggggcaaactacttgccagagtaaacaattgtcacaatcatattaacgttttaataaaagtttttcttcacaattcacacatagtgatgaagcacttgaaggcttatttacttctctagatgtctagctggaggataaaacatggcctattatgtactagttctgtcggaccaactgagacacagaagtggtaggtacctggattgctcacaatttagttgtgtgtcataaaaggcatgcaagcatttgttcaattagccttaaacaagcatgcagccaacttcaggcagggttctgtgatggagagatgaagaaaagtaactaactcctccctcaaagatttcacagtccagtgagagaggcagatacaccaagagataactctaatgcaaccccagtactgttgtgatagaaagatatatgtatagaaatcatggggag

SEQ ID NO: 672 - DNA, 522 bp, Homo sapiens
gggcagtattgtttcatttatccattcagtcatcaccaggtataatgccatagtggcaggaagcgtagggtgatttgggagaatatttatgaattgcctacccagaataggagacacagggtagcacttctacaaaggtgacatcaatatggtgtctttaatgctcaagtaacagtttgcctatgatggttaaaaggaataagaacagatatgttggggagaggaaatagcacatgcaaaagcacagatacatacaggtttatggagagttcaggggactagtagtgaattggtatggatgaagcatagtatgaatgtgaccatgagcgaaggggtaaacctgggggagctcaagcggttttagcaaatagtgaatccctttacctggtaaatatgaaggttgcagagaaaattaagatatctatctatctatttatctatctgtctacatgaaaatgtagacaagaattagttttcagccacctggaataccaagttcagctttctgaatttaattttaat

SEQ ID NO: 673 - DNA, 537 bp, Homo sapiens
agggctttagaagtaattgacataaggaaaatctgcctaaaagaacataatgagcatgtctttaaataaacaaacccaaaaaagttaaaaatataagctccattttatgacacagatcagaaacactgagaaagtctcttccaggtagaatgctgagaaggtataataggctcctcacaaagcatttggaagcatttaacaaaaatacagaggtggtgttcccagaaaaacagtttttctactgagtggctctatagcctgactcatcagggagtctgtgggatgccataccagcattgggatggcagcagtctctctcctgaagacctcacaattgagctttaaaaataatacaattcaaggccaggcgtggtggctcacgcctgtaatcccagcattttgggaggccaaggtgggtggatcacttgatgtcaggagtctgaaaccagcctggccatcatggcaaaaccccatctgtactaaaaatacaaaaaattagtcaggcatggtagtgtgcacctgtaatcccagctactc

SEQ ID NO: 674 - DNA, 515 bp, Homo sapiens
aggaattgttgaggatgactgaggtgtctgggtaacgctttcaactgaaactgggaaaggggatcaactgaaactgggaaagggtttggtgtggcaggtataagtaatgagttcaagttgtatattctgagatggaagtgtcatgaggacattcaggtggagaaatcctgtatgacactggaaatggatccagagttcacagaagtcaggataaaggttagggctcattagcatctgggtgatgaacgaaggcttggagagaatggggtcccttatggggagtgtgttgaaggacaacaggccgaagatagaaacctgaagcaaggacagaactttctttcagagctggtagaagagaagtcccaaaagagagacaaaaactggttagggagatagaagaatcacggaggccaagataagatagtgtttccgagagggtgccaggaagggacagctaagtctgctctggaggtcagggatgtgtacctaaggaggcaacatctaaactggtcttg

SEQ ID NO: 675 - DNA, 277 bp, Homo sapiens
aagggaggaccagcctgggcaacatggcgaatacccatctctcaaaaagtaaaaaatgagccagtgtggtgatgtgcacctgtggttccagctatttgggaggctgaggcgagaagatcccttgagcccaagatgtggaggctggagtgcactggtgcgatttcagctcactgcagcctctgcctcccgggttcaagcgattctcctggttttttttcccgagttaaagggggaaaaccccccttaaaaaaaaaaaaaaaaaggggtgtctttttaa

SEQ ID NO: 676 - DNA, 339 bp, Homo sapiens
gtgaggtcaaaaaagacaagtggcttgcccaaggtcacagagagaatcagacatagaagaaggatttgaactcaggcctccttgatgaaaaagcccatggtctctccgtggatatccagaaagtagatatgtgtggatagtcttcaaatttcagggtcctttaaacctggaatagggacaaatgcaaattgaggccaatggtgtgtgtgtgtgtgtgtgtgtgtgtgtgtgtgtgtgtgtaaagcacactgacgccaatgggatgagagagtgtgtgtgtgtaacaaacgcacactggggccaatgggtgagagtgtgtgtgtgtgcgcacatgtgtgt

SEQ ID NO: 677 - DNA, 305 bp, Homo sapiens
cagaaggggatattgcaccaccacactccagcctgggtgaaagagtgagactccgtttcaaaaaagtaattaggaatgttatgctgaaatattatatataatattaaattacatggtattgaactcagaatttagtagctgtatgtggattctgatgctatcaaaacatgtgttgcctagaatcctctacccaggaggggatcattacagagcacgcaattttctaaatgtctgaaaggttgccatcttcaatgcaatgcaaagtattctttaacctgctttgaaaagtatttccccccctttct

SEQ ID NO: 678 - DNA, 596 bp, Homo sapiens
agaaggggaacctgggagggggaggttgcagtgagcggaggttgtgccactgtactccagcctgggcaacagagtgagacgccgtctcaaaacaaacaaaaacaagtggagtagttaagcaaccgcatacagaggagttggacacccacctcccctcccagaccccagctcctgcccattctccaactgccgcagaccagaagtgtattcaggcccaaggcttggggacttgagggacaacagaaggctagggaggtgcagagctgaaaatcggcagatagatagaagtcttgaaacttgaagtggaggctgagtgcggtggctcacacctgtaatcctagcacttgggagtctaaggtggggagactagcctgggtaacatagcaagacacttgtctctacaaaaaattagccaggcgtggtggcgcacgtctgtagttccatctacttgaaaggctgaggtgggaggatcgcttgagcctgggaggtcaagctgcagggagctatgatcataccactgcaccctcagtgacagagtgagaccctgtctctcaaataaaaataaaaaacttgaagtggatgaaaagatctaatat

SEQ ID NO: 679 - DNA, 579 bp, Homo sapiens
ggatccagggaagaagtgtggggcagtgatcagaacactgtggaagttcagttctctcttttgtggtttcattaatttaacaagatttgttttatctttgaaatgatggctgtggcctaaaatgtgctattatttattgtcatcttcccatgctaatttttggtgatgatgctgacttttgatgaacaaagccaggagtcttcaataaaataaaacagaagtcttgagaacaaaagtcaattgtggtctgctaatttttagcatatttatttatttatttttggaagtgaggagagtgtctattctgtaaatgttgacttgggcaaaatatgaaattttacacagacctatcactttcagagtaatgtcaaaaggatcacgtagagaaatttggtgaattatcagcaggttagttgtagataaaagacagcaggctgggcacaatggctcatgcctgcaatcccatcactttgggaggtcgaggcaggcggatcacgaagtcaggagattaagatcatcccggccaacatagtgaaaccccatctctactaaaaatacaaaaaaaaaaaaaaaaaaaaa

SEQ ID NO: 680 - DNA, 541 bp, Homo sapiens
gaccccagctctacgttttgtgtttcattattctaagcatacttcagttacaggaagaatgaaaatcagtatgaatgttcttgaacacccttttattgcaactcataaaacatctctgagtgtgtctgtcacactgttgaggagtaagtagtatcctctttcagtgcaaaggtcaaacatttgcttatgtagaatctggtctacttgttatcatgtcgttttggtaactagcctccacaatggcatccagtgattcccgcctcctagtattcatacccttgtctaatccctgctacactgtatcagagttgctctgtgtaaccagtaggatttggtaaaagtagtgatgtgccacttccgagattaggttacaaaaggtggagtttccttcttgattgctgtcatactttctttctctgaccacttgatctggaggaagccatgtcatgagcagccctatggaggaacccacaagatgagaaactgaaggctctaatagccacatgaaggctcttggaagcagaccctcccactccagtca

SEQ ID NO: 681 - DNA, 563 bp, Homo sapiens
gggatggaacacgttcagggtcacataatttatttacttttttttctgagacggagtcttgctctgttgcccagagctggagtgcagtggcacaatcttggctcactgcaacctccgcctcctgggttcaagcaattctcctgcctccacctcccacgtagctgggattacaggcatgtgccaccatgccaactaatttttgtatttttagtagagacagggtttcaccatggccaggctggtctcaaactcctgacctcatgatctgcctgcctcggcttcccaaagtgctggtattacaggcatgagccaacgtgcccagccgagagagtcacgtaatttagtggccagtctagggtgaggccccagacctttggactgctaggccattgccttccatttactataccattttattttcatattagttcattttattactacaaatatagaacacacttggtataaacttctaaacagtacagaaatatccagaattaaaacacgagtctcagcctgggcaatatagcaagaccctgtctctaaaaaaatacatatttttt

SEQ ID NO: 682 - DNA, 503 bp, Homo sapiens
gggtgggaggagtacttccttgttcctgtggacatcaggaatggccatggaacttgatttggccactggaagatgagtagaagtgattatttgtcatgtctaagctgaagccttattaggagccattgcatgaatgatttttgctaattttcctcagccccaagaaaaatgggccagataaagactatttcttttgctagattccagaatgaagaagatgcctgtagccaacctgtagctgacaacaaaaatgagaaatacattttgcgctgtctgttgaacccaagaccctttcagagtaaaactaatttaataatcataagtactttctttcactgtgttgacatttgcactttggctcaaaagtgatgttttggaaaacttgctggttaggaaaaaatcagtgcagtttcttcaaactatgttctgcagcaccatcaccacatatttatagtaaacgaagttttacttggtcgggcatcgtggctcatccctgtaatccc

SEQ ID NO: 683 - DNA, 482 bp, Homo sapiens
ggggtaacataaggaaaccctgtgtttacaaaaaatttggaaattaggcatggtggcacgggccctgtagtaccagctatttgggtggctaaggagggaagatcacttgagcccatgaggtggaggctgcagtgagctgtgattgcaccactgcactccagcctgggtaactgagcgagaccctgtctcaaaaaagaaagaacaaataaacttattttttgagatgtgtgaaatgagattctcaagtcagttgagtgatgaggatcatcaggtcttgaagccttgtggaatattttgcttccacctgtttttctcattttcacactttacaaaaattctgcaagctatttctttttattacagataaggaaactgatgctcagggtgataaaaaggtaaaaaaatgctgagccatggccgggcgtggtggctcatgcctgtaatcccagcattttgggaggttgaggtgggtggatcacctg

SEQ ID NO: 684 - DNA, 411 bp, Homo sapiens
gtagcctcaacctctcaggctcaagtgattctctcacctcagcttccctggtagttgggactataggcacacaccaccatgcccagctgatttttttagttttttgtagagatggggtttcaccatgttgcccaggctgatcttgagctcctggggtcgagagattctcctgcctcagaatctcaaagtgctggatcacaggtgcgagctctcacacacccagcggagaaacaggctctctcatgctttgctggtggaggagccacattgataaaatctctataaagttgtaactatcaaaattatacatactcttgacccaataaccctttctggaattcagtataacattccactaggtacaagattttttgtttgtttgttttgtgacggagtttcactcttgtagcc

SEQ ID NO: 685 - DNA, 458 bp, Homo sapiens
  misc_feature 395: n = A,T,C or G
gctggagtgcagtggtacaatcttggttcactggagccttgacctcccaggcccaggtgatcctcccacctcagcctcccaagtagctaggaccatggttatgtgctaccatgcccagctaatttttaaattattttttagagactgggtctcactatgttgcccaggctggtctggaactcctgtgcttaacgatcctcctgcctcagcctcccaagttgttgggactataggtgtgagccaccatgcccagcctcagtatgtgtttttaaaaatgcatttaaaaacattattctgagcaggggtccatggcaccaagaaagtaaaaatgtgaagaactcatgcgtacaaagtaactttacagaaggcgggaggctagaggttacatcacttangaggagaatgtctggttgaaaatacactttcagctgggcacagtggctcatgcctgtaatccc

SEQ ID NO: 686 - DNA, 442 bp, Homo sapiens
  misc_feature 104, 392: n = A,T,C or G
gggtcatagtagtataacctttaagtaacttttcctgagtacccactatgtgccaggcaaaaacatgggagacataggtatgtttaagctttcagggtgcctantatgtgtgagaggtggcagccaacagattaaattgagaacatatatgagaaatttgattgtgtctggtacacagtatgtgcttattggaggattggaagcctgccttcatcatcagtaccgccatcatcatcacccagcaagccaattcttcaactaaaatcagttcagagtaagcagggagacatataaacagtcatcatatgtgtggtcaataaaaagagaagtctgtaccaggtaaagaggcagcacagaaaatagagtgatggacttgtctggggattgcaganagagcttcagagacgtcaggtctgagctggattttgcaaggctctctctt

SEQ ID NO: 687 - DNA, 487 bp, Homo sapiens
ccatcaggttatgttaggtagttttgttttgtttttttggttttttttttgaaacagagtctcgctttgtcacccaggctgcagtgcattggcgtgatctcagctcactacaagctccgcctcccgggttcacgccattctcctgcctcagcctcccaaataactgggaccacaggcacatgccaccacacccggctaacttttttgtatttttagtaaaaacggggtttcaccgtgttagccaggatggtgttgatctcctgacctcgtgatctgtccgcctcggcctcccaaggtgctgggattacaggcgtgagccaccacacccagcccctacattaggtagttttaaatttttttacatagggaagtgtgagggcttggggcttcttcattgaccatttgggctcatgtcacctgtcctttatttctttttatactgcttcatcaagataatttacataatatacagtttacacatataaag

SEQ ID NO: 688 - DNA, 450 bp, Homo sapiens
agtcatattttataacatgattgaatcacttgttatccagagtttaaaatctcatagacctctaatcaatgagtcagtgatgacaatgttacttatattttagacagagattctcaggtttttttttcttttttctgcctcaacagcaagtctttcaaaacagtggctgtcaggtttccaatggtggtaattctcctggagaggaagtgggtttgggtagactgaggcagctccagaggtcatgcagtttgaaaaagcctccttcaataaagtgaataaagatccccaaagacatgcaggtctcaatccctggaaccttgtaatgttacctgatatagcaaaagggactttacagatgtgattaaattaaaaatcttgacattattcaggatgatctagatgggtcataaatgcagtccaagccttataaaagggaggcagagggagatt

SEQ ID NO: 689 - DNA, 576 bp, Homo sapiens
tctcatatttgcacatgactttgtgtacttaaaatagattaaatgatccgcttttggggctatcaagctaagagtttgttattgatgctgctgacactgtcattgatactgttgatactgtcactaatactactgacactgattattattaatataattgatattactggtccagtagactcgataacaaacttttagcttgataactgtattatatgaatatattctactttttaaaaattaagacattacagataaaactaaagttttctttgatcaacactctcaagttcaggtccttttccttctcctaactaatgattattactgtatttggcatgaatattttcatattttgaaaaatatttttcataggtatatatgcccttgtgaaattcacaatgttatttttatgtttgcctttgtttttatcataaatggtttcatatatgtatctttgtataacttgctaattttgcctaacaatattgtgagatccatctattttaatacatgaagttcatacttatttaattgggtctataatattttattttataaatatttgatgttttg

SEQ ID NO: 690 - DNA, 179 bp, Homo sapiens
ctggtctcgaactcctgacctcgggtattctgcccgcctcggcctcccaaagtgctgggattacaggtgtgggccaccgcactcagccagacagatactatttttaaatgatgctttctaacagtattctgttaaatggctaaattaatgttgtttctcaaatcttgaaatttttaaat

SEQ ID NO: 691 - DNA, 493 bp, Homo sapiens
  misc_feature 253: n = A,T,C or G
gactcaacctctttcagtggtttcttagccctcccctggccagctctgaaggccagacctcagaggggaaatggatcttggacttggggtatcctgagcaagagcaggaaaaatagggatactccttttgttggtcttcttccagtatatgcccaagttcaaagagaaagagagaaagtggagagacatgaagcaggagaactgggactcaagagagcaggctgggtgtggtgtttcacgcctgtaatcctancaatttgggaggctgacgaaggaggatcccttgagcccgggagtttgagaccagcctgatgacttcgtctctactaaatatatatatgtgtgtgtgtgtgtgtgtgtgtatgtgtgtatatatacgtgtgtgtgtgtgtgtatgtgtgtatatatatgtatatataaatggaatatggccaggtgtggtggctcactcctgtaatcccagcactttgggaggctgaagcaagtgaatcac

SEQ ID NO: 692 - DNA, 394 bp, Homo sapiens
gcaaacttgggatatgaacttgcttctgtctgtcttgaaagtctgttctcataaccattttaccatgttgtcttgttttcgagtagggcaaaatggttaaaggaaaagtagattaaaagaaaaggataaatatctttggagtcatcctacgcactggtattataaagatgaatgagacctgatccttattgtctagcaagagagacaaacacccagtttctaagcacaataatagagataaggagaattcagaaatgtcatgtgacttctgggtttcttttttttttttcctgaaacggagtctcgcactgtcactcaggctggattgcaatggcacggtctcacctcactgcaccctttgccaggttaaggctatttttttgccccagcctcc

SEQ ID NO: 693 - DNA, 524 bp, Homo sapiens
  misc_feature 438: n = A,T,C or G
atttatctctcttattattaagcacgctgcctccctacatcactagggattgactttggctgcctgtaatggaaaacctaaaatgctggcgtgaattgcggggtttcacttctcttgtgctaggagaaggacaggggtagtggctccagactggcacagtggctcttccatgtcaccagtgccctttaactttctcctctgcctttctcatcattctcaggtttgcaaaatggctcttgtacctctgtgattacatccaccttccaggaagtctaaagggcaaaaagtgaggtcaaaagggatgagccagcctagtgtgctccttctattattagaaaaatgatagctttcttggaagaccctaactagtgagcttcagcttatgtctcactggccagaagtatgccatgtggcaatacttaactgcaggggatctangcgagggaggtgttttttcattgttgttttctcatgaagaagaatgtatggctgcctggagcaaaattggggtgctactcataaag

SEQ ID NO: 694 - DNA, 596 bp, Homo sapiens
  misc_feature 312: n = A,T,C or G
tacaggtatctatcttaactcatgaaggcttatcatctgtaaaatcatgataataatggcaactacttcataagattatcaggattaaatgaaataatgtattcagggctctgagtgcaatgaataccacatatttaagcacttaattcaagttggctataattatttttaaaagctatactatagtattcagaagaagtgacctttctgtttttttaaatatatcagtcatcagaaatggaatgtggggtagggtggggggagggagagtattagaaaaaatagctaatgcatgctgggcttaatacctangtgatgggttgataggtgcagcaaaccactatggtatacgtccacctatgtaacaaacttgcacatcctgcacatgtgccccagcactaaaaataaaaacaaaaataaaaatgcagtgtgaaagtagaggtaaaataattttctcacaaacagaataattttattaatataaggaggtagaatcaataattgttattctatttgaccttttctatacctaaataactgagaaggaagaaaaaaagaaagactggctgggtgcggtggctcacacctgtaatccc

SEQ ID NO: 695 - DNA, 358 bp, Homo sapiens
ggtcttgatctcctgaccttgtggtccacctgcctctgcctcccaaatgctgggattttaggcgtgaaccaacgtgcccggcccttctgatttttttttttttttttaaaaaaaaacaaggtctaattattcccaggttagggtcttgaactttggggcccaagaaatccttttgccttggcctcccaaagggctgggataacaggcggaacccactgggccgggctattaatgtttcctaattactgcagggctaatgtttttgtcagcttcaactttgccacacttgactaggaattaaaaataaaaaaacagtacccaccctggccagcatggaaaaaccctgtctttactaaaa

SEQ ID NO: 696 - DNA, 575 bp, Homo sapiens
tggttgctagtgagagagaagtaagagtggttctcaagtgaagtcttgtaatgactaaatagcacttttctgagtgatggttacataaaaatatacatgataaagttgcccagaactgtgtgagtacacatgtacacacacacattagcacctttgagtaactataaaactgctgaaatctgaataaaccctttgattgtaccaatgtcaatttctagtttgttgttatgccattcttatgcaagatgttacaatatggggaaactcgtaaaaagctcatgtgacttagctggatattttcatgttctggtgaatctataattgttctaaaaaaagataaaaaagcaaagaatgggacttattttttatcatgcaacattaataataagaaaacaagaatggatacatgagaagctaacaaagaagactgacaagaaagggatcaccagtgatagataattattccgtaatgtaaaagagccaatttatcaaagagacatacaatctcagttgtaaatatgcaactaacaacaaaatattgaccttcaggagcaaaaccataggaaaggaaagca

SEQ ID NO: 697 - DNA, 449 bp, Homo sapiens
ggggtggatcacctgaggtcaggagttcgagaccagcctggccaacatggtgaaaccctgtctctactaaaaatataaaaaattagccgggcacagtggcaggtacctgtagtcccagccactcatgaggctgatgcaggagaatcgcttgaactcaggaggcggagtttgcagtgagcggagattgcaccattgcactccagcctgggcgacgagtgaaactccatctcaaaaaaatatatatataatgtaaatgcaaaccgtttcactgtgtggaaaccagtcactgttggcagtgagcggagattgcaccattgcactccagcctgggcgacaagagtgaaactccatctcaaaaaaatatatatataatgtaaatgcaaaccatttcactgtgtggaaaccagtcactgttactgttctctggcagtaacatactgttttttttt

SEQ ID NO: 698 - DNA, 614 bp, Homo sapiens
ttgcagcaagccgagatcgtgccactgcactccagcctgggccacagagcgagactacgtttcaaaacaaaacaaaacaaaaacaacaacaacaacaaaaagaactgttaatcagggcaaaaagagggcattgaggcatggaaggaactgcagaaggatgctaccccactagggttaagggactaaaaggatgagattagaattactaacatttagaaacttggaggaagggccctgcagaattggaattaatacctttgagcagagtctgctggcctgttggtactagtgtttctgagggatgcaacgaggttggttatgcaagttttggaacaactgcaaatcgaaataactgctgctaccaggatgaattccactaccaagacaggcattaaacatcattcctaaggcactcacccactctcagaactcaatagactgaatcttcaacttgcaacaatggctttgtttttgacatgtgtcaatttcccttttgctttccagctcagctatatattttaagtgtgtctatgtatttgcagcagatagaagtgattcctttcaccagcttaatcatttgtcaagagtttctgtgcacttgtcttcatccctgt

SEQ ID NO: 699 - DNA, 561 bp, Homo sapiens
gagaggaatgaataataacagaaatagagcactaagggaaatgagcaacttacaatcagaaaagaaccccttacaaaaaaggaaacgagaccacgggcaagagcaagaacaaacaggacagcggagaatcagactcctaattcagaaactggggttatcaagcctagaatgtgaaattagagcccttgctttaatttctggaaataaaagagaggattggaaatgtggtaaagagcaagaaaacttggaggagtgttaaacagaattctaggaataaaataatataataggaattagaatttccatgggcagatgtaacagcacattagacatagctgagaaagaattaatgaattggaaagttgaatttaagaaattatctagaatgcagcctagagagacagaaatggaaaacaggaaattagttaagagacatggagataaagtggggaagtctaacatgcatctaactagaatttcagaaagggaaagggaagcgagacagtactgaagatgattgatggctgagaattttccagacttgaaagacattaatccaca

SEQ ID NO: 700 - DNA, 297 bp, Homo sapiens
  misc_feature 70: n = A,T,C or G
gcctccgagcgctgttaggagagggaagagctgcactcatgcacacagggtgaccctgggtgaaatgtangctccatggctccgagggggaagtgggctcaaaagagtgggcttctgatctgaatccaagaagggttaggaataccttagccagtttctgtggctgctttttttcttttgaaacaggctctcgctctgtcacccaggctggggtgcagtggtgcaatcacgggtcaccgcaacctccatctcctgggctcaagcaattctcccacctcagcctcccgagtaaactaa

SEQ ID NO: 701 - DNA, 609 bp, Homo sapiens
ggggagttgtgtggatgcagtcccattagatatatatagaattactggtttatctgtgctacatcttagtaagctcccattactttcgcattaggattaatagaggtggaatttgagatgtgctttgggaaatgggtatgatttggacacatggaagtgaagaagtgagggaatcaatataaataaggacacaggaaaagtcagagtatacctttctgcaagtagtttactgggttgtggtggcctgtggttatgcttgaaatcttttggtgggttttcttgtgcaagcagtttagtaagatatttgaggggacagaagagaagagatggttggaaagatgaatttatacacaagactttagactacattccttaggcagtagcaaaccatagagactcttttaaatcgggagtggcctggtatgagttggggtctacgacaatcaacctggtaaccttgtgtaaaggcatgaaagaagggaagagggtctgggcaaggagatcagttaagatgccagtacagatacaaagggacaactattgtatgagtccacctatgtgaggtacctagagtagtcaaattcataaggacagaaagtagaatggtgg

SEQ ID NO: 702 - DNA, 495 bp, Homo sapiens
  misc_feature 409: n = A,T,C or G
attctaaggtctttgcattgttcatgaggagggtaaaaataatgttttttaaactaagcatgcatgtggtcaggtgtggtggctcatgcctgtaatcttactgctttgggaagccaaggagggagaactgcttgaagccaggagtttaagaccagacagggcaacatagagagatcccatctctaaaaaataaaataaaaataaaaaattagccaggcatggtggtgcatgcctatagtcccagctactcaggaggccactgcacttcaacctgggtgacaaacagataccccaactctaaaaattacaaaaagaaggccaggtgtggtggctttagtctgtaatcccagcgctttgggaggctgagatgggagtatcacttgaggtcagcagtttgagaccagcctangtaacatagtgagaccccatctcaacaaaaatttgtaggccggatgtgggggctcatgcctgtaattccagcactttgggaggctg

SEQ ID NO: 703 - DNA, 586 bp, Homo sapiens
ggggactggagatggcagatttctgtctcctttgcctgtgggactgaggccccgggacagaggagacctgggaaacttggtgccaatgggagagcttcagccctgaaggggataggccctcccatgtcccggtgcccttccagacagtgcaacggaaccagtaaaggggattcctggatggcatcaggagcactgcacagacatctgaaccgtggtaaggtttgggccctgaggcaggacccgtccctaaggacagaagggaagcctgatcacctccaggggagtgacaactaatctgacccagaggggctggggacaacaagagtggctcattgatttgaatgaaactcacaccccaacagagacaggacacgagagtggctcgctaagtcagctcggaaaagaaaaccggaggtggcgagagtggcccaccaccccaactaggaaactggaagtggcgagagtggctcgctaccccaaccaggaaagggagctggaagcagggaagtgtatgagtgtgtgtgataaagactgttccagaaggaagcaacgtgaggagtgacatacagaaggctacaggtctctt

SEQ ID NO: 704 - DNA, 619 bp, Homo sapiens
gatacgccccttatccctctggagtctcattttcctcatctgtaaatttagaataatactcacctagtaagatatgaggattacagaaaatttatgtaaacatttggcgcttattaagctctccataaatggtagctattaatgcttatggacacatttggtaaactacattttatatgtatggtattattaacctgtttccttagatatataatttcttagtgacagactaaacacatttctgcaaaaaagtagtctatacatatgaatatattttcccttaagtattaaaatcttgctgtgatagtctttttgtgaaatttgttatgagaccatgatatgagcaaaactcaaaataatgagatctttttctttcttcttcctttgctgtatttcagtctatagtcttcagtgaattttcaatccattcattcattcattcattcattcaacaaaaacttactgaaggcttactatgttacaggatctatgctaagggttatatttcaggaggaattagcctatatattttactacaggtggtttcattaaatatgatgttattatgataaattatttcagtagtatagaaaagttagcataatagtttatgtaaact

SEQ ID NO: 705 - DNA, 638 bp, Homo sapiens
ggatcctgtacacctctgtaacacttatgactatcataatcatgtaatgaattacataattagtagattaagatctactctttaaaatgcaagactaacttttttgttgttgttcaccgggctttgtgtatagttaaagcttactactgtttgttctgtgagtgaatgaataaaatatcgtcataatctaatagttttatggtatgggcaagaaaggccctgtgaaacagtgattccaagttctttaaaaggatgtatagtttaaagatcattataagcttaaaaattgaagaaaactttacagaaatatgagcaatgagattaaaaactagcatagacattgggaaatcatgatgttgtagataggttaagccaaattaaaaaatcccgtggggctggctaattccagggattgttaaactcagtcaattgattaatgcttatatcaataagagggatcaactctttctttattcaaaaagcaaaactaaataactggcagtatttatggcacatgatcactatgttattgaataaattatgaatcttttttttagctggaatgatgaaatctaagtaataattagactgtgggcgtggtggctcacacttgtaatcccataaacacttataaacac

SEQ ID NO: 706 - DNA, 562 bp, Homo sapiens
  misc_feature 324, 459: n = A,T,C or G
gcaaaaagatctttttgcccttcagttgtgttttccatgagttaatgtgatttactctagtggaagccagtgcagcttaagtggagttcttgccctgaaatggagccaggttatggatcagcagagctgccaaaagcatcttgggggaaatgtttctgtgtcaccgtcagttgatggaactcaaattttcactcccgttcaacaccacgtgggggccattctgacttctgcggagtgggtatgatcagatcttctgtaaaagtgtaagcgaagaggctgggcacggtggctcacacctgtaatcttatcacttgggaggctgangtgggtggatcacttgaggccgaaagtttgagacaagcctggacgacatgataaaacctcatctctgctaaaaatacaaaaattcgccaggcatgatggtgcatgtctgtaatcccagctactcaggaggctgangcaggagaatcacttgaacctgggagatggaggttgcagtgagctgaggttgcaccactgcactgcattccagcctgggtgacagagcaagactctgtcccaa

SEQ ID NO: 707 - DNA, 196 bp, Homo sapiens
tttatgtaatatcttcagtccttactaagtatcctctacctttgggataaatgttgtctttagttttcaactactttttctttggcttattctctctctctccctccctccctctctctctctctctctctctgtgtgtgtgtgtgtgtgtgtgtatctctgttctcttaatctatctgaattgctgtgtcggttt

SEQ ID NO: 708 - DNA, 594 bp, Homo sapiens
gggcacacgtatacctatgtaacaaacctgcacatgtatcccagaacttaaactaaactaaaattttttttaagtgaattttagccactagattttatagttgaagcatgccatggtacttgtgattaggcatctacctgtgtatttattcacctgaacacctggatgtgtagaataaaaattgctcaattgttgaaggctgctgcatcgctctatgctacttgttctgttaaagtatgttcagggagccagcccagagaggcacctccttttagctctgtgaggccttaaagctgggtcaccatgaagtccctgtatatatattttttgttttaataactccaagtaaccaaatgaaaacaattatttataaaatgtattaagaagtaaatgttatcaatttgggactttgcacaactattattaatgtgacctcaggtcccatgacaaattagaatggcaatcctgggtgagaagttaattttgtcctgaagctggcagaatcaacatgcaccccagttgtgggataggcccgttctctcactccatcacatccaacacctggcaaggacagcttttggtatgctaaagaat

SEQ ID NO: 709 - DNA, 413 bp, Homo sapiens
ggaggagatgggggtttatgggagtcagctacggacagctattggggatgtgagaaaaaagacagagggtattagcttgtaaaagcatgagatcaatattataataagctgatataggaaacaccagaagaggagcagattttacactttaagaaatataaaaattgtactaccagcaaacagaatgaaacatattcatctagaatccagtttaccaaagaaacatttcacgtctctactaaaaatacaaaaattgccgggcgcggtggctcacgcctgtaatcccatcactttgggaggctgaggtgggtggaccacgaagtcaggagattgtgaccatcctggctaacacggtgaaaccccatctctactaaaaatacaaaaattagccaggtgtggtggtgggcgcctgt

SEQ ID NO: 710 - DNA, 470 bp, Homo sapiens
gagacaagagtcttgctttatttaaactaatctcaaacttctggcttcaagcaatcctcttgcctcagcctcccaaatttctgggattatatagggataagccatcatgctttaagttttttcattcacagctgtgggctcgttagcaacagtggcaactgtgctttcctgtgttaaatttattatagccctgggattttaaaatacgccctgtttggggaaatacttttggatgtccttgaatgtctgaaccatggagaatccttgtcagaaaaaaaaaacaaacaactttgtacctgacttttcgtggggtaaaggtttcacaatcttttaacgccttttagagagtagcttcttacttgatataattatgtctttacccccaaagtctggttttcagagtagataggtaaataaaccttaatgaaattaattattggctgggcgcggtggctcacgcctgtaatccc

SEQ ID NO: 711 - DNA, 376 bp, Homo sapiens
tggaggttgcagtgagctgagatggcgccattgcactccagcctgggcaacaagagcgagactccatctcaaaaaaaaaaaaaaccgggcttttttacccctttataaaaagcctaacattaattttaatttttcctggaaaaaaaaattttttataaaacagttggcatatgggctggaaaaagggttaatcccttacccttttttttaacttttttggaaaaccttggttccttccatataaaaaagaaaattcctcatggttgggacctaaaaaaataaaccttttaatacccggccttaaaaatctttacagggggctgggcccgggggctaacaccggaaatcccaccctttggggaggctgaggcagggg

SEQ ID NO: 712 - DNA, 587 bp, Homo sapiens
ggtgggaatgggggaaatggaatgagtctaggaagacagggtcatagccaaagcctcataaacagctctcttaaaggaagtatttgtaacaatagtcttttttcatgtttaactttctgcccttatttcattattatgtggtgtctgttcaatgaacaaatatagagaaacaaaacagaaataagtcacaaattcttacaaattcttacagtcatttttctatatatgtgttgatgttaatatgcatgttttacataaataaaacataaatgtttttaacataattatacattattcattcaagttttatagaatgtatgtactaatatttttaataattacatagaatcctgttgtattactaagccataatttaaaatttagtttccaatttggggacatgtgtgttgtttccaaatttttagctattgtaagcaactgagaagagaattcttgaacatacgataatatgcattggtctaaatatcctggtacgacatgtggcttaatcacccttttcatcccagaccctggtttcaatgtctggtttatgataggtcatgtaaggatgggatgtttcctggggt

SEQ ID NO: 713 - DNA, 526 bp, Homo sapiens
gggggcactttttgggctaccaacttacatgacaccatctctacattcaaggatactaagtaaagagttccataagtaatttactgataaatatgatatttaaggtatataacttgaatcacatttaaaatataggttattttaaatgtgaaaaaagaaaaaaagaataatcatacatcagtgcaaaaaaacacagcagaggtgaagaatattgttggtcatagccagagtatatcagtagtcattaaaaaaccaaaaaggtaaattgagacaaagaaagaaaaacaaaacttgaagctttagaactgcatgtcctttctctttcagaaaagggagaaaggggctggaatacaaggaagggagtctatgcgtgtcaaaaatgctttggcctggccgggtgcagtggctcacgtctgtaatcccagcattttgggaggccgaggaaggccgatcacgaagtcaggagattgagaccatcctggctaacatggtgaaaccccatatctacttaaaaaaaaaaaaaaaa

SEQ ID NO: 714 - DNA, 515 bp, Homo sapiens
  misc_feature 111: n = A,T,C or G
tagggaaatcaatatgtacacatttacagttttaaaaaataatatttgtgaccatggtgtatacggaactttgaccctggctgcttctgctcatttaacatcccattctangcattttctgaagtctttgacaattatttgcaagcatgttgttaatggctgtacaatgttccattgaattgtaggtaacaacaacacaagtacagctggcccttgaacaacacgggattgaactttgtgggccagttttatacagatttttttcaataaatacattggaaaattttattggaaatttgcaacaatttgaaaaaactgacagatgaaatgcataacctagaaatattgaaaaaaattcagaaaaagttagatatgtcctgaatgcattaaatatacgtacatactagtctattttaccatttacaaccatgaaatacacacaaatctattataagaagttaaaatctatcaaaacttacacaaacccagactgtatgtggtgtcattctctgtca

SEQ ID NO: 715 - DNA, 580 bp, Homo sapiens
  misc_feature 384, 530: n = A,T,C or G
agaagggcagtgaagtgcacatagtaaccctaaccgtgacccgaatcaatagaacacttagaattatcacaaacaataataacagataatactcatgtagcatttactatgctgcagacactgttttaagctctccaactatatttactctccctgcaactctgtgaagtaggtattgtaattattctcactttacaagtgaggaacagagacataaagggtaaatgtcttgccctacattactcagctctgcactggaggaggtgggatttgaacctaggtggtctggctcagagactgcttttactgacttcatcactgtgttcagtgagttccaggacgtgagtttgaataaatggaaaaatgggaacctgaaaccctcancaaagtctgctgtgagcatgtgtctctgatctttcaagtactgctttggccactcttaagcttcgtgaaccttattttcctcatacataaatgggaggggagtagtaatgacatctactatttattaatcacctgctgagcatcangggctgtgatgagtgccttacaggtctcattttttcctcactggagccct

SEQ ID NO: 716 - DNA, 626 bp, Homo sapiens
gggatgggaggtaactgaatcatgggggcaggtctttcctgtgctcatgatagtgagtaagtctcaagaaatctgatggtttttacaagggggaattttcctgcacaagctctctttgcctgctgccacccatgtaagacgtgacttgctgctcattgccttctgccgtgattgtgaagcttccccagcaacgtggaacagtaagtccaataaacttctttcttttgtaaattgcccagtctctggtatgtctttattagcagtgtgaaaacggactaatatacagaataaaagtaacttcaacatgtttcattttctcttggaaaagtgctatgcttaaaaagattgttgccaaatttatctttcaaaatacaagtcagatgttttaattactgtcttcagatgatttcagtgagtcctcaatattaaaataataaagcaaaacttctttaaatctttcaagccactagagagcttgctgtttttttttttagctgtttagtcttatctcaatactggcgctataactaattttctatcaacattacactgtccatacaattcctgacaaataaagaacacaggaagacaagcaggttcctccccgcacacccgactttctttga

SEQ ID NO: 717 - DNA, 506 bp, Homo sapiens
gctctgtagtcccagctactcgggaagctgaaacaggaaaattgcttgaacctgggaagtggaggttgcagtgacctgaaatcatgctactgcactccagcctgggcaacagagcaagactccgtctcaaaaaaagaaagaactatgaaacccacaaattaaagtcatgtatcattttaagttttctggtagtcacaattaaaacgttaaaagaaaccggggagattaattattttattcggttcaaaatatccacccaggcatgggcccatgcctgtaatcttaccactttggaaggccgaggcagggggatcacatgaccccaggagtttgaaaacagcatggacaacacagtgagaccctgtctctactaaaaatacaaaaattacccaggcatgctgtgcctatagtctcacctacttaggaagctaggatcgtgtcactgcactctactctgggtgacacagcaagaccctgtcttaaaaaagtaaaaaatcctgctgggc

SEQ ID NO: 718 - DNA, 400 bp, Homo sapiens
gcaatcttggctctctgcaacctgcacctgccgggttcaagcagttctctgacctcagcctcccaagtagctgggattacaggcgtgggccaccatgcccagctcattttttgtatttctagtagagatggggcttcaccatgttggccaggctggtcttgaactctggcctcaagtgatcctcccaaagtgctgggattacaggcatgagctaccgcgcctggccagtgggataagtatttcaatttgagtccatgccaagggaacgaaggctaagctgaagacaagctctgggggttatttgatagtaaattgagaagaaagaagtcggcaagtgctatgggcccccatgcatctactattatttggatcccagaacacttcaggggatagacagttc

SEQ ID NO: 719 - DNA, 555 bp, Homo sapiens
gggtccaacatgggcctcctatctcttcccagtcatcacattgcattgtatttgcctgtttgcttttcaaactctttctttctagataaggaaacaaaagccttgaggaatgaaggaaattgccaaaagaccattaacaataataaatgactaagccctctgttccacagtctgcacttttctttctgcggaatgacccttgtaattgtaagccagggcatttctccacagatggatatcccataaaaacaaagccaaagtgacctgaaaggcacagagaaaatgtatgtctatgtccatttcttccttctcaatggttcctttttattcgtttgaaaataagagtgtgaagatgtgattctaatgactaataacaactaaaacatttattaagtgctgattatttgccagctcttttgctgagggttttatatggatcctctcatgtattcctcataataaacctgtaaggcaaatactatgattatccccatttcacagataaggaaatatctacagaggagtatttgacttgatttgggccccataactaat

SEQ ID NO: 720 - DNA, 429 bp, Homo sapiens
gggaggctgaggccggagaatcgcttgaacctgggaggcagaggttgcagtaagctaaaaccacaccattgcactccagcctaggcaacacagacagactccatctcaaaaaaaaagaagttatgtgaagggttttacagtaggctggctgactttaagacagaacccattctagctgggtgacgatggacaaccaccacttccagctgcagtctcctcatggatagaatgggggtaagagcacccatctgtgtttttcactgtcttttgcccatcatccatagtaacgtacaatttacattgtgacttagtacagacacaataatatgtttaactgataaaaaaaaaaaactttcaggaaacattgctcaccctcagggaaatgcactctgctattttctacccttgtttttttttttttaaaggttc

SEQ ID NO: 721 - DNA, 553 bp, Homo sapiens
gctcccaagtagctgggaatataagcgtgtgccaccatgcccagctaatttttatatttttagcagagatggggattcaccatgttggccaggctggtctcgaacttctggcttcacgtgatccacccaccccatcttcccaagtgctggcgattgcaggcgtgatccatattgcccaaacactgagggcttctacacggaatttaagtaaaaacaaaactaatttatgatgatagaagtcataattgacaattatctttgtgggcagctattgactgccacaggtctcaagagaactggagggtgctgaaaattatttatatcatgagctgggtgtttacatagattcatatgaacataaaaattcatcaagctataaacttaacatttgtgttcattactgtatgtaagttacacttccataaaaaaagacttcaaacaccacttaacaaaaaatatcagggaataaatctagtaaaatctgtgggacctttatagagaatatgaggcaatatttttgaaagacatttaaaatgaaaaataaatgaagaga

SEQ ID NO: 722 - DNA, 421 bp, Homo sapiens
  misc_feature 113: n = A,T,C or G
gaggattggttgagcccaggagttggagaccagcctgggcaacatggtgagacctcgtctctacaaaaaatatactgggcatggtggtacatccctgtggtcccagctactanggaggctgaggtggcaggaccacttgagtctgggaggttgaggctgcattgagccgaaattgcaccagtgccctccagcctgggattacaggcatgagccactgcacctggccaggaattggttttaatgatgagggactagttcatattttggctgtggtactggctgttagagcaattggtctggagcaagtgaaaccccatctctactgaaaacacaaaaaaaaaaaaaaaaaagtggtttataaaattattttaaatcttgttaaaaaataaggctgggcccaggggttaacccctgaaatgcc

SEQ ID NO: 723 - DNA, 548 bp, Homo sapiens
gtcattatatggacagagcttggtatagtgtttgacattattattattattattgctatcataattgtcagattaaagaaagacaggctgaggccttaataacatgatgtggttctacccaatactcttagttatgacaacaatagtatggctatcttcaaaatccaatataagcagcatagtcattaattacaaaaacaaaggaattgtcttttaatcatagatttctgattctgaaaatatcactaagttcaaaaaaggtgttatatacattaagggatgctctatactgaacaggcaagaaatctggaagataaagggccttgctcaaggttatcccattaacaggtatcccagaagggatttgccctgaggtcacctacctataaatccatgtgcccaaccccagtgatcaaagtgattcttggccttcaacagctcacgtgaagaaccttcattctcttagacaaagttggcctctccaatgtcctaagtgttttagtaggtttttctcaagatattcaaccccattatgtattactctttta

SEQ ID NO: 724 - DNA, 534 bp, Homo sapiens
  misc_feature 462: n = A,T,C or G
gtgcctggctattgtaaggcttaaagttttaaagtatctgttatctgcataaagaataaaagtgaataatggaggggaagaatggaatgtgaaaacaaagaagagaaaggagagaaaagtataaaaaggtggacaaaagaaaacacaaaagatgatagaaataaatccaattatttcattaataacaataaatgtaaataaaataaatgttccagtaaaatgataaagattgtgttagaacggatttttaacattcagctgtatgatgtttacaaatgacacatccaaagcacatggatatagaaagattataataaaaggatggaaaaagatatgttgtgcaaatactaatcaaaatagactttaagataagaaagtattactaaagataaaaaaggatcagtgcataatgatagaatgttcagtttcatcagaaaaagataagtaattctaacattttangtcagataattccattttgggcaaggatgtgggaatatacactgttgctgggagtgtccagtctgtggtcat

SEQ ID NO: 725 - DNA, 568 bp, Homo sapiens
  misc_feature 57, 467: n = A,T,C or G
gtatactttcagtaacatagcattagcttgtccatttccaaacctacactgttttanaatgagtgttggtaatcatcaggataggcactgggaaaggattggaagcagtgggatttgtttttagggaggtcatagggaatttaaggacttaaagatcaagaaggcatctaatagggttctatgtaaagataagagacaactaaaacaatcaggtaagaaaccttttgatccaataattctgttaaatcttccaagatatgtacatcaaattatataggcatcccttggagctattgcggcttcggttccagaccaccacaatgaagcaaattccacatgaaagcaagtgacacacactttttggttttccaatgcatataaaagttacgtttgggctgggtgtggtagctcacacctataagcctacccctttgggaggctgaggcaggaggattgcttgagcccangagtttgatatcagcctgggcatcatgccaagacctcatctttacaaaaaataaaataactagccaggtatggtggtagcatgtctatgttcccagctacc

SEQ ID NO: 726 - DNA, 180 bp, Homo sapiens
gacacagggtttcaccatgttagccaggctggtctcgaactcgtgacctcagatgattcacccatctcggcttcccaaagtgctgggattacgggcatgagccaccatgcccatcctttgaataattttagaatcatattgtcagtgtacacacaaattgcattgaatctatagatcaat

SEQ ID NO: 727 - DNA, 642 bp, Homo sapiens
ggtaatccatatccatgttctacatgatcagtcagagaaaagaaaaatgttcagaaatatggaggaaattgttatcagttcctgtgttattactccacccctcccttatttttcctgaagtatctctataatctgtttagtgttgagtccccctttaatttcatgccttttatgttttgacacacattccatcatgcaactctgtctctcattaccactttgaaaagtgtttcaaacatttgctccaatactttgtgtttggtgaggtatataagttagtctgtggtagataatggttgttagcacattgttgaactgcacctgcagtaaagtgagtttctttatcaaatgatatataagtaggaggccgaggcaggagaatcacttgaccccccctaaaaaaaaatcctaatcctaacccagaaataaaatggctctactcatgaatgggaaagtttgtcatccttgagattttatatatatagacacacacacacacacatgttgtgtgtatatatatatgcactgtcagtcaaatattcacattctaaatgactgtcagaaatattccatggaaacttcatctctgaagattatacagatttaaactgaacatcatctacctacagcaaatcacttgac

SEQ ID NO: 728 - DNA, 485 bp, Homo sapiens
cgacaacaatctcttctcttaaaattgcttactattacaccagcagagtgtttggtattaattgagcaaggaggagtttgtaggaaaggcttggcttaactaggagagggaatgccagggagaaatctgtatttcccactatttttttttctttttttgaggcacagtttcactctgtcgcccaggctggagtacagtggtgcaatctcagctcactgcaacccccgcctcctgggttcaagcgattctcatgcctcagtctccgagtagctgggattacaggcgtgtgccagcacacccagctaatttttgtattattagtatagatggggttttatcatgttggccaggccggtctcaaactcctggcctcaggtgatctgcccaccttggcttcccaaagtgctgggattacaggcatgaaccaccacacctggccacttcccactattttgttgataaagacatttggatttccctgcatt

SEQ ID NO: 729 - DNA, 521 bp, Homo sapiens
aaacacacacacacacacacacacacacacacacacacacacacacacacacatacacacagtggcatttgaaagggaagggaaaggaattagtatcaattaattctttgaaatgtatctctttgttacatatgatgtgagacaccggcttgtgcaatgagatataagaagggggaactctttaagccgtacaaaaacatgtatcaagagatttgatatgtacaggggatataaatcttgtattacatatatacacagattagtgatattagatgtaaatctatttagcagggaaagtataagcaatttatctttaatggaagggatgggtgagaggccataatcttctcttctactacttgataatatatgattaaaggaaagcaagttaaagataataattatttaaacataattctttatgtcaaaattaatattgcatgaattgtgaattctatatttacctgaaagaaacctgtaaaatctcggcgctgtgtggacgatacagattttagcgcatt

SEQ ID NO: 730 - DNA, 517 bp, Homo sapiens
tatgtgtgtgtgtgtgtgtgtgtgcgtgtgtgtgtgtgtgtgtgtctgtgtatgtgtgtgacccaactaataagaataagtattgagtgactataattggggaagaatctacaaaaaatagaacaatatttagggtcgggcaagcgtgcattaatttattattccgtgatccatcaaatatttttgagggcccactaagtaatagggacccttctgagtatatataaggggtgatatgcacacgtgatcctcacccttgtggaaattacaatctaacagatatgacatacttcagtcaaattgaaacaattagcgcaaatatatctcataatgccatttatccaagtcttgcttttcaagttggtcaagaatcttggctccttgacattttctatctatcaattgtctttgaattgcacgaaaaagaatgttgtaaaggaacatggctctgtgaattccctacacagtagtttaaacgccttctctatataatgcaagtattgatgttataatatct

SEQ ID NO: 731 - DNA, 441 bp, Homo sapiens
gaggtcaggtaagcgggactgagcagggtcacttgtgagccaaggatgtgagggcccagcccctgaggcccctgcccacccatacagcaagggccacctggaaacctccgcagggacaggtatttgcaggcaaagtcgctgtttgtctgatggaaaaacaaaaaaaaaggcagaagacctgaggtcaagatttcaagataagcctagccaacatggcgaaacctcgtctatactgaaaatacaaaaatcagccgagtgcagtggcgggcacctgtaatcatagtgggaggctgaggcaggagaattgcttgagccggggaggcgggggttgcagtgagccgagattgcaccactggactctagcctgggtgacagagcaagactctgtctcaaaaaaaaaaaaaaaagggatgggcttttaaaaatttaaaccttaaaaaa

SEQ ID NO: 732 - DNA, 624 bp, Homo sapiens
ccaaatttaattggttattttcgatttcaaggatgtctaattgagtctttgtttttttctaagacaagaccctgcatttatttcatggatgtgattctcttttttgtttggttggtggggagacagagtctcattgtgttacccacgccagagtgcgttgggacagtcctagctgactgcagccttggactgcctcaagtgatcctcttgccttatcatcccaaatagctgggactataggtttataccaccatgcctggctaactttaaattttattttttaactttgtagagacagggtattgccattgccctggccagtcttaaactcctgaccccaaagcaggattctcccacattggcctcccaaagtactgggattacaggcatgagctaccatggctggcctttgtattcacttttgagatagctttattaagttttttgtgttttttaggtataaattttaatgtttattgagtttgtcttcatcactgtgttgtactttatcagttttttagtgtttattggttgtattctcatctgcagaagacttctcacatttattccagcagaagaaaaataagccagccacatggcatcttatcttcatagtggcagggt

SEQ ID NO: 733 - DNA, 461 bp, Homo sapiens
gggcccatcatggtccccacccctttctcagtaattacatgtttaattgtaggtactaacattagtcccatcttatagatgagaaacctgaggcacagagatgttgagtgactggcccaaggtcatacagcttgtaagtggtatgactgggatttaaaactgtagtcttgttccagagggcaagtgctaactaccacactctagtgtctcatttgtaggttcaataaggtgaaataatgtttatgaagtccctggaatactatcaggcatattagtagaaatttaatgaatagtggttatagttatcatatttaacttccaaaaatcttttcaaacaaggttatatctattatgtaaatgtcgatatcacacttgtcacctcctatttcaaaatttcttctttaattggcaaattagaagaataattcaggccgggcgcggtggctcacgcctgtaatccc

SEQ ID NO: 734 - DNA, 387 bp, Homo sapiens
gaccatttatatgaaatgtctagaacaggcaagtccgcagagatagaaagtagagattcatggtttccaggggctgtgggaagggggaatggggagtgactgctaatgggtatggggtttctgataatcagagtgatgataatattttgaaattagatagcagtgatggtcacacaattgtgttcaaaaccactgaactatacctttttttttttttttgaaaagggtttaattttgtcccccaggcgggagggcaaaataaaatttttggctcaccaaaacttccgcctccgggtttaaagcaattttcctgcttaaccctccgaattagctggaataacaggcttggcccaccaccccctgttttttttggttttttaaaaaaaa

SEQ ID NO: 735 - DNA, 626 bp, Homo sapiens
  misc_feature 190: n = A,T,C or G
agtatgaggtggagagagttaaagagctcagttttaaacaggttaggttgcagtcacctgtcagtccttccagggaagagaaattcccagcaggcatttattaagatgaatgaacagcaagttttcaaatggggacatggtgtttggtatcatcagcatcagggagggaggtgaagccatgggagcaganaacatccctcaggaaagtgcataaagggagaagagagaggactaagaatgtattcatgaaaagtagcctttagcgggtgagcagtcagtagggcagaacaagatgctgttatttcaaatcagggtggtctaatagaggagtcaccttgtttttattcagaagaattttaggaaaatgaaactcctctaaaaagttctagataggctgaaacctaaaacagacagtacctttgtattggatgctttgggcaccagccctccttcacctgtgacagacacataacatccccttccccatctgggtgaatgccagcgaacctcagaatgcagaattcttcaccaatgctttagctattgacattcgaccttaagccttcggtggcagcaagttaggaaacttcaaacatcagcaattacagctgtctggttgggtcctc

SEQ ID NO: 736 - DNA, 568 bp, Homo sapiens
gtgtgtgttcatttcagtgttcctttatggcatataaacacatacctctctgaattctcccttctccagttgttaacatcttactggttccctccaatttgtttggagggaaccagtaattgatccaaataaataaaagaatttaggatatgatataggtaggtgggaggatcctcaagcccaggagttggagaatatagcaagctacgactgcaccactacgctccagcctggggaacagggcgagaccctgtctcaattaaaaaaaaaaaattagtggaaagaataagattattcactaaatggtactgaaataataacagataacatttagggaacattaactatgtaccaatctgtatattaaatgtttatattaaaatacaacctggccgggcacggaggcccatgcctataatcctagcactttgggagcccgaggcgggtggatcacccaaagtcgggagttcaagaccagcctggccagcaaggcgaaaccccatctctactaaaaatacaaaaattagccggacatggtggtgggtgcctgcagctacacaggaggctg

SEQ ID NO: 737 - DNA, 481 bp, Homo sapiens
  misc_feature 111: n = A,T,C or G
ggggttaggattgggaagcggcaagcagaagcatttagggattggctggcaatgttttacttctcggctgagtgagggttgcatcagtgtttatttgataacacgttctangggctgggcaagatggctcatgtttgtggtctcagtactttgggaggccaaagatgggaggattgcttgagcccgtgagtttgagaccagcgtgggtgacatagcgagaccctgtctctacaaaaaattaaaaaaaaaaaaaaaacccacctgcccttgaggctgcattgacctataaatgaaccactgctctccagccggggcaacaggacaaaaccctgtctcaaaaaaaaaaaattaaatttgaacacttttgttttgggcagttttctctgtaatatttaacttttaaaaaaaaaatgttggccaggctgatctcaaaagcctgccctcaagtgatccccccaccttaggctcccaaagggggggg

SEQ ID NO: 738 - DNA, 580 bp, Homo sapiens
atcttaaactttaatatctgtcataatttggaaacggttttactcattgaggcaatgttgcttacttgaaaagcacaccattgcttctattaaacatttttttttctgtcaaaagaaagctggagtaatgtcataattttttgagacagggtctcactctgttggctaggctggagtgcagtggcacaaccatggctcactgcatcctcaacctcccaggctcaggggagcctcctgactcagcctcctgagtaggtgggactgcaggtgcacaccaccacactcggctaattttcaaattttttgtagagatggggtctcactctgttgtgcaggctagtcttggaactcctggcctcaagcaatcctcctgtctcagcctcccaaagtgctgggattacaagcatgagctacgacacctggctctccactaccgcttcttgagttggtatagcatagtgtttaagaatgtggacttttgtagccaaaccttgacctgtgaccagggcaagttttaacccctctgtgactcagtttccccatctgtaaagggagtatgatagtaatcacacccagttct

SEQ ID NO: 739 - DNA, 523 bp, Homo sapiens
  misc_feature 202: n = A,T,C or G
gaactttaaattatacacttactataaagtcagtcatttcagttgggtatggtggctcacacaatcctatcgtggccccaatccctgttggactgaacaaagggagacgaacgtgggaataaaaataaagacaaaagagtatatttggaagaaggggtcagggggctccttgctccagtgaacaagggtcctgagcttttancacccttcgtatttattgagtaaaggagatagggaggaggtggttgtcagtcagctgcttgactcggtgcaggcttgcacaactgcattctctgaacagtagtctccagatgttccagtagataacctcaaggagcacggcgccagaaagtgactgccctcagcaaaccttctggcggcaggtgcagatgtgagtttgcctacatcctgcattcatgataaacagtttactgtttgatcatatagcctcagtggaatgctaagttggtcacgatcctctggctttcggctctctacataatcccagcattttgggaggctg

SEQ ID NO: 740 - DNA, 518 bp, Homo sapiens
agaagggatataggcagttttagtgtccaaataatgtttagtgtattaaagaaaattcttgccaggcacagtggctcatgcctgtaatcccagcactttgggaggctgaggtgggcggatcacgagatcaggagatcgagaccatcctggctaaaacagtgaaaccccatctctactaataatacaaaaaaaaaaaaattacccaggcgtgggggcaggcccctgtacccccacctacgtgggaggctgaggcagcaaaatggcgtgaacccaggaggcggagcttgcatggacccaaaatcaccccactgcactccacccgggcgaaattccatctcaccaaataattaattaattaggaaaattctgatgtataaaaacatatataggccaggcccgggggttcacgcctgtaatcccaccactttgggaggccgaggcgggcgggtcactaaatcaggaaatcgaaaccagcctggccaacatggtgaaaccctgtctttactaaaatacaaaaa

SEQ ID NO: 741 - DNA, 508 bp, Homo sapiens
  misc_feature 340: n = A,T,C or G
ggtctctcttggtttcaaggagtagaaattctaactagattaagtaaaattgggctttgttgaaaagggtaaaaggtgctctaataaccccaaacagcaagatcactgaggccttttggcagtggggagccagagctactttcccatttcacccgttcagggaccaggctagtcactgcttcttcctctgtagacctgctttgttctcagcttcttcttcagccagtcttccttgtacatggctcagtgttgtttgccaccttggacttactcagtttttgttaaaattcacatatttccagaacaggaatctgaaagagctgttctttttgagccttangtgggtcagtgaacaacctgtggtttggtctttttcttcatccccttccaggggtctgtatttaggtttagatagctagtgaaaatgaaatggcactgggtaatgacattgattcaatacatcttggctaggcacactggctcacgcctataatcccagcactttggg

SEQ ID NO: 742 - DNA, 530 bp, Homo sapiens
  misc_feature 433: n = A,T,C or G
attaatatttttacagctctatttcaggagaactgacatataataaaccaggcccattttaagtgtgcaatttgataagttttggcatatgtgtacctgcaaaacaataacatgatgtaaataattaatttttccaaagaaacgaaaacaaatttctaaaatccttttaaaggaaagtacatatgtgggcgtatgtgtaccagtaggcattcagctgctttggattttggcaaataaatcagaggtacaggatcttttgaacttccagcaaaattattaattacaaatcacatatttcacaaatgattcttttttatcatttccattttagtccatgagttttgaattttaattgtattttataatttattaaaatgttggtggccgggcgcggtggctcacgcctgtaatcccatcactttgggaggccgangcgggcggatcacgatgtcaggagatcgagaccacggtgaaaccccgtctctactaaaaatacaaaaaattagccgggcgtagtggcgggcgcctgt

SEQ ID NO: 743 - DNA, 513 bp, Homo sapiens
  misc_feature 427: n = A,T,C or G
ggcccacccccaaccctagtagctgggattacaggcatccgccaccatgcccggctaatttttgtatttttagtagagatgaggtttcaccatgtcggctaggtttgtttagaactcctgacctcaggtgatccactcgccttggcctcccaaagtgctgggattacaggcgtgagccaccatggctggctgcagtatgtcttaatataaacatcctttaggatgtagttacatccatggatagaagtacatttggacactatttcaaagcctctcaaagccaaataggaatgttttgaaaagccatcttagcctcaatttcagatattaattgaagatgaaaattaatttctggctgggtgctgtggctcacacttataatcccagcactttggcaggccaaggagggcagatcacttgagctcangagtttgagaccagcctgggcaacatggtgaaaccctgtctctcccaaaaatacaaaaaattatctgggcatggtggtatgcaccc

SEQ ID NO: 744 - DNA, 533 bp, Homo sapiens
caaccatttcaagtggtgaaaaatgatcaaatggcataaagcaaattcaggagcatttattcaagaaaaattagtgattcctaataagaaaagttggagtctatgatatttaagctgggatctgttttcccctccgcttctcagatacagctttgaggtacaaaactttcacactgggtagggcaaggcagaccttaaagactgacaactcccattctttccagacccatgttacacagcatctgttgtgggcaagtagagaatactgctacatccaacagcttccattacctgtggcaccttattgtggaagttctaaacaaggtcatggctggtcataagaacttgcagctcttcaaccctgcccaagagaggctgattttacatgaagcagaatatggaagatcttagatacaaaaaattccccgaaagctaaaatttcagtgatactaacaaaattcacagcaacgtaccccagaggtagagaaaaatcagaatcaagagttgataaaatatattaactaaagcatcta

SEQ ID NO: 745 - DNA, 551 bp, Homo sapiens
  misc_feature 258: n = A,T,C or G
gggaagatggcgaacgggacagttcctgaaagggaatgtgagatttggcaatcaggatagctgtagcctttactacggaaaagtcagtggtggagacagcagacagattcagcgggctgaagagtaagcagaaggtgaggatgggtaggcaggagatagaaaccattattttttgaagtttgatactaaagagaaggaaaggctaatacttgaagggggaagttttctaaatgggtgggacttgagcatgtttactancacaaggagagggaggtgagaggccgaacgtaagataggcaatagtgggtgaagcaaaggccgtggagaggcagacgaaacggactccagcgcaagccacgctgcaaatctctatgccaggcagtttgtgcctctgagctctgccatgccattcccttttcctggatgatctcttcaataaacctttactgagccactcctggggcagggattattctgcaactgtgctgcaaaggtaaacaacctgggctctcttctccagaactcatttccaacacttgaagagacaagta

SEQ ID NO: 746 - DNA, 446 bp, Homo sapiens
gggggcattgaagggaaggtaaccccaggctggtgccccggaatagggatgggtcacaatgttgaggacatttcgcctgttgcagaacccacctgcaacacagtgtggcccttgccatgtgacttgtgtgtgtgcctgtgtgtctgtgtgtgcgtgttttaattttgacttcataagtactctagttatgagcttatttaacattgggttttactaataggggtatgtgttgagaaaatttcaaagttttagaatatggttcacccacatgttgcttccctgtaaatataatttttaaaaccagattctgggccgggcatggtggctcacctctataatcccaaaacgttgggaggccgaggcaggcgaatcatgaagccaggagtttgagaccaggctgaccaacacggtgaaacccagtctctactaaaaatacaaaaaaaatt

SEQ ID NO: 747 - DNA, 591 bp, Homo sapiens
aggagttgcaagtccagtggaccagtggccagtggcagccaggacagcagtagcagtgttctaatcagatctgaggatgacgtctctgtgtgtccttggctcaccagcctctccctcagtccttctacaagctgccaagccaggatccttgcaataatccctttttttgcacaagtccagattgatttctgtaataacagttgcaaatatgcaactaagatcctaatgctaatcaagagtaaaaaaagaagagagggcaggaagaaaggagataatgcaggagagcaggagggagggaagccatgcatcactttcaccctgtaagaatcactacgtcggccaggcacggcggctcacgcttgtaatcccagcactttgggaggccgaggcgggcggatcacgaggtcaggagatcgagaccacggtgaaaccccgtatctactaaaaatacaaaaaattagccgggcatggtggcgggtgcctgtagtcccagcctctcggagacgctgaggcaggagaatggcgtgaacccgggaggcggagcttgcagtgagccgagatggcgccactgcactccagcctgggcgacag

SEQ ID NO: 748 - DNA, 660 bp, Homo sapiens
acagaagggaatgcccacttaagagaacgcagtggacgagattttggcctcagtaaaaatgtttagaaagcactcaaaatggtacacaaaacctctaaaataattgatacatactgtcatttgcatagttgctagaggcttaatatgagattaaattatactattgaaaatagctgccaaaaccaaaactgtgataacctatgttgttggatcaaagtattcaaacagcatttgtttctaaagctctattttacacatttaaaattgatatcatttcttacatattgcctggctcatgttcagatgctttttcaagcagaaaagttttcctgctagatgacacaaacataaaggcgcagaactgtgaactgtggtcccaattcaccagattaacactgagaacacaggaaagaataaagatattcctgcatttaaactaataataataattaaaaaacagaaactaaatagaaacattcactaacacacagttaaaaatggttgatttaaagactattctatatgtttgccacagctacataccacttacttccttttaatgacaacattaaacacaatgaggatggttttaaatggcaaattacacatgcttctggatttcgtgccaacatcatcaaagagtacacatgcctgacttac

SEQ ID NO: 749 - DNA, 413 bp, Homo sapiens
tttggccgagcggcctcggctgcgagaagagacagaggggggttctgacactttccctctgagtccttggacaccttacctaacctcttggaagctcctgtctgtgaagggtgtgcacagagagcttcggtagcctgcgaagcagccattttcacttccacggagcagatgctggcctgggtgctggaatatggaaatgaggaagatcctgcctgaggatttcatgacagtgctgcgattaccgacgtgagccactgtgcccagcctcactttaaaaaaaaaaaaaaggttatgaagcatttcaacacaaaacctcctttgctcatcacaaccacccagtgaagcaggcaaaacaacaaaaactccccacctgtgataaatgtgaggcctgaagtctcccacatacccacggc

SEQ ID NO: 750 - DNA, 541 bp, Homo sapiens
gtggagaaatgatggaggaaataccagagaagtgaagcagttaatgaaaaaaaacaaaaaacaaaacaaacaaaaaaaacacctctcagcctccaagagaagaaaagaggcagattctctatgacggggggtgctgggccttgatgtcctaactcaggttctttcagagtcacctggtctttggtcatctcctggtcatctcaatgatctcatttgttagtgaaattcagcttagtttataaaaccaagcccagattctcctagcctgcaggatagaaataatcaccaagagaggataacaggagggtctgagtgtataagtgtgtgtgtatgtgtgtgtgtgtgtgtgtgtgtgtattttaaaggaagccaattagtttcttgccattaaaacagttctacaaagaacgtcattattgatggcctctttagaaacatcgtgtatgtgcttctcaaagttagcagtgtatcaagttcttagagatgttaaacatttctaatttaagtgcatttttgaagcctgggtgaacaaatgttcaaa

SEQ ID NO: 751 - DNA, 451 bp, Homo sapiens
  misc_feature 61: n = A,T,C or G
cttgttcttttggccgaacggcctacggctgcgagaagagacagaagggctattacatatngaaccaatataatttgatgtcaaatattcacaattaggtttaaaaaatcccctacttggccgggcgcagtggctcatgcctgtaatcccagcactttgggaggccaaggcgggtggatcatgaggtcaagaaatcaagaccaccctggccaacacggtgaagccctgtctctactaaaaatacaaaaattaactgggcgtggtggcaggcgcctgtagtcccagctactcaggaggctgtggcaggagaatcacttgaacccaggaggcagaggttgcagtgagctgagatcgcgccactgcaccccagcctgacgacagagtgggactcggtctcaaaaaaaaaaaaaaatcccctacttatgttaaaagtaccaaaaatagggccagg

SEQ ID NO: 752 - DNA, 606 bp, Homo sapiens
gcatggaacagttatagcactatctcatggatgtgacttagggaataaatgaggtaaagtaagcgtgcttagcatagactgtgcccatcatcactgccaattaaatggtgggtgtcaatagcagtaatcggaggagtatcctgatgttcctggactcagctcaaggattggctctaaataggatttttaggagttttgccaaacaaatggccaggtggcctctttttttcttatcagtgagcacagctgacgacacacacacacacacaaacacacactcaacaaataatccaccaaaacccaacagtatcatcacctgtaattccattttttaaaaacacaatattaagctagtttagaggaagcaatgagtagctctgaggggagatattagcgatggctgaccctgagcatctgaaatgattgctcgtggtgcatccactcacccgagtgtgagggatattgatcatgaagtgcctgggacaaatggagagggagagctggggaggggaccctcattagaatcaaggaatcctagtggggcgagggtaaaacctgtcagcattgaaggcaaaaattggaagtaatcaaaaacttctttggaaa

SEQ ID NO: 753 - DNA, 567 bp, Homo sapiens
acgacagaaggggctatttgggaggctgaggtgggaggatcgcttgagcccaggagtttgaggctgcagtgagctattatcacaccactgcactccagcctggatgacagagtgagatcctgtctccaaaaggaaaaaaaaatacgataaaaaaggcactacaagtattcactgtaacaaaaactgtactgtctcagaggttttattcctcgaggattctaaaaaagatgaggtttcactgaatataattatattgctataaacttttgaaattttatatccaaaatcccatgtgggggttttaatcatatcttgaaaaagacatgatctgaaaaaaagatgactgatctttgttttgtctggagacttgaaaaatgtgaacttttcagtctggaggatatatgatcagagtccataaaatgcagactttattgtatcaaaactcagaaatctttattagaactgagttttcccatgaaaattgaaacacattaactataaaacaagtgaaaggaaataatactacatacaatgtgtaggataactgtaaaatatattacttacatg

SEQ ID NO: 754 - DNA, 648 bp, Homo sapiens
ggcctacggctgcgagaagagacagagggtgatcctcctgcctaggcctcccaagtgctgggattacaggtgtgagccactgcatttggcctagaaagctttttgttgttattaaatcatatgtgctctataatatagaacatatgataccacactttggtgacctatcgatttcttctcacatgttgtagttgccttagaatgtggaggcagctggaaggcacgatgaacagcaatagcagatcactggcctctgacaactgtcattcagttgagagatgtggattaaatatgcccccaattattatctgtgtagttgtgagcacataagtcaatagacatagcgagtgcttcccatggttctattactttattcccaagagtcactcgtgactatggccagcagcctctggatatgttaagatgaaggagatatcaacaaagcatcatgaaaacattattattattattattattttctttgaaagggagtctatctctgtcgcccaggatggagtgcatgggtgcaatctcagttcactgcaacctccgcctcccaagttccaatgattctcctgcctcagcctcctgagtagctgggattacaggcgcccgccaccactcttggctaatttttgtatttcctgt

SEQ ID NO: 755 - DNA, 511 bp, Homo sapiens
acagaaggggcatgctaccacgcccggctaattatttgtattttttgtagagatggggttttgccatgttgcccaggctggtctcgaactcctgggcttacacgatttgcccacctcggcctcccaaagagctgggattacaggtgtgagccatggcacccaatcccctattaactttaaatgaagtattgaatcataccttcaaatagtttctacccagattggtatgagaaatcctgtgcctcaaacatatggtcttatttctaatgtattccagagggctaagttaactgtgtatttttaaaaattattctctcggccaggcacagtagctcacatggtggatcatacctataatcccagcactttgggaggctgaggtgggcggatcacttgaggtcaggagtttgagaccatcctggcctggtgaaacctgtccctactaaaaaatacaaaaattagctgggcatggtggtgggcgcctgtaatcccagctactcagggaagttga

SEQ ID NO: 756 - DNA, 336 bp, Homo sapiens
gcttgttcttttggccgagcggcctcggctgcgagaagacgacgagggggtggctgcggcatcgccggcctcgctatgattgttgggtatattttggaagtgtgccagaattgatcagtgagttgcctgacatttcttctcattgtgatggcagaagttctagatggcaagccagattgtgatctgatgccatcaaaagtcacaagaactggccgggcaaggtggctcacgcctgtaatcccagcactttgggaggtcaaggctggcggatcacgaggtcaggagattgagaccatcctggctaacacagtgaaaccacgtctctactaaaaatac

SEQ ID NO: 757 - DNA, 348 bp, Homo sapiens
atcccagcactttgggaagccaaggcgggtgtattgcttgaggtcaggagttcgagaccagcctgactaacatggtgaaaccccatctctactgaaaatacaaaaatattagccaggcgtgggtggcgcatgcctgtaatcccagctactctagaagctgaggcaggagaattgtttgaccccaggagagggaggttgcagggaaccgagatcgtactactgcactccagcgtgggtgacagagcaagactgtgtctcaaaaaaaaaaaaatattattattaccttgattttttaaggggtaaaagctctacattcatacatttgaaggaataaataaggggtaatca

SEQ ID NO: 758 - DNA, 538 bp, Homo sapiens
cgacgaggggtgtgtgcgtgtgtgagcacatatgtgtgaatgtatacatattcacttgttatttacaatattgaatattagattaatagccctattttattgttctgaaaagctgaagctcatggagatcacacagttcacacatttggaaaactctgtatgtaaacaaaatccctagctcgggcacccccactagacaccgctgactcactctagcacacacagtcaaaatggaacagaaattccaatttaattagtaacttttaagtttaaaagcaccataaaattaagcttgcaggaaaatgaataaggtcgctcatggatggtggctttgtaaatttgattaaaacttttgaaagttgccaggcgcggtggctcacgcctgtaatcccagcacttgggaggctgaggcgggcggatcacgaggtcaggggatcgagaccatcctaacatggtgaaaccccatctctactaaaaatacaaaaaattagccaggaatggtggtgggtgcctgtagttccagctactcgggaggctg

SEQ ID NO: 759 - DNA, 403 bp, Homo sapiens
aatgaacatttatgcacctactaagataacatcgacttaaatgaagtgaaaattgacagaactaaagggtaaaatcgtacagctctactatcatagctggaaacttcaatatgatcgctccacataatggatacaacaaccagactgaaggtgaggaaacacaggacttaaaaacacagtaggcctacttgatttaacagacatctaagttaaattatgtttgcagttcaatcaaggttaaggttatttttagggcctaactggctttgtctgctctgggattatccagacctggtctgcatttaaaaatttgcttcaatactcccttttaggatcaagtagtacacaacactatatccaacaacaactactacagaatacctattcttctcaatgcacgtta

SEQ ID NO: 760 - DNA, 399 bp, Homo sapiens
acagaggggctcactgcaacctctgcatcccaggttcaagtgattctcctgcctaagcctcccaagtagctgatattataggcaaccaccaccgcacccggctaattttctgtatttttagtagagaccaggtttcatcatgttgcccaggctggtctcaaactcctgacctcaggagattcgtccactttggcctcccaaagtgttgagattacaggcatgagccactgcacctggcctaggtcagcattcttatgccattcttagcgttcagaaatccagcattcctgacaggtgttcattcagcctctgctttaaccagtcttccagggcctggtagagtgctcgtttctcaatgaaaatttgtttcattggtgtgccaccctttaagttcttggt

SEQ ID NO: 761 - DNA, 492 bp, Homo sapiens
acagaggggccgggatggtctcgatctcctgacctcgtgatccacccgcctcggcctcccaaagtgctaggattacaggcgagagccactgcgtccagccaactcccctgattttaatgtgcaggcaggattgagactaactactctagtctaatggttctgaaacttgagcaggcttcaaaatcacttggaggccttgttgaaactcaagtttcaagtgtgggctgcattcccagagtttctgattcagtaggtcttggggagcggagctgtgaatttgcatttctagctagtccttaaaggttgctgatgcacctggtctggggaccacactggggttcctctgatctcaatgggaagaatggaatcaggagtggtagaggctggatacttattaaacagagatggggtgagcacaattatctcaagtagccacagggctagagtggtaaccagagtgttttgactggcaggaacctgtgggtataatca

SEQ ID NO: 762 - DNA, 487 bp, Homo sapiens
acagagggcagtctgattatcaaaggtaagtactttcttgaaaaacactgccagataccacagcttgctgagggaaaaatgagagatgccaaaattcatttcaaaataccccatgcatgtgtttagaaaagagttttagcaacaacaaaggtgttcactattataagatgttcagccgcttacctctagcttcagagagtctattccctgttcttgtcacctaactctaatgttgggaggcagctgagtggcctccaggataaccatattgcaggacaaaagaaaggagatgagatggaagagtcccagcttcagccctgcggagcctgtgagctggtgccaaagataacagagtagcatcaaaggctgtatgggacagctgtactggcagggagctacaaaggcaaaagagagagagaaaggcaggagagagagacagacagagagacagagagagagagagacaaacagagaaagacaaagacag

SEQ ID NO: 763 - DNA, 676 bp, Homo sapiens
tttggccgagcggcctacggctgcgagaagagacagaggggaggacattcaggtggagaaatcctgtaggacactggaaatggatccagagttcacagaagtcaggataaaggttagggctcattagcatctgggtgatgaacgaaggcttggagagaatggggtcccttatggggagtgtgttgaaggacaacaggccgaagatagaaacctaaagcaaggacagaactttctttcagagctggtagaagagaagtcccaaaagagagacaaaaactggttagggagatagaagaatcacggaggccaagagaagagagtgtttccgagagggtgccaggaagggacagctaagtctgctctggaggtcagggatgtgtacctaaggaggcaacatctaaactggtcttgaggaacagccgaagatggcgaacgggacagttcctgaaaagggaatgtgagatttggcaatcaggatagctgtagcctttactacggaaaagtcagtggtggagacagcagacagattcagcgggctgaagagtaagcagaaggtgaggatgggtaggcaggagatagaaaccattattttttgaagtttgatactaaagagaaggaaaggctaatacttgaagggggaagttttctaaatgggtgggacttgagcatgtttact

SEQ ID NO: 764 - DNA, 613 bp, Homo sapiens
acgacagaagggtacggctgcgagaagagaccgaggggactgcacagtctggtgtgttgggggagatgcagagccactggatcaaggcggtgtgtgttcttcatgtgacctgcttactcatggaaagtaattgcagacatcatttgcatgttaaaagtggagagagagggagcacatagagtttggtaccacttatagcaagttgtagaacagacaaaactgaactaaggtgatagaaatcagaatattggttgtctgttgaagggtgaggggattaactggaaagagccatgaggggtcttgggaggtggatgaaaatgttctcgattggggtggtggtggcatttgtcaaaatccatcgaactgtagacaacaatgaattagacaattaattttaattcatttttaaaagttgggagctgggcacagtggctcatgcttgtaatcccagcactttgggagactgaggctggaggatcacttgaggtgtgtgctggggccaggaagttcgagactagcctgaccaacatggtgaaaccctgtctctactaaaaatacaaaaattagccagaagtcgtggtgcgtgcctgtaattccactactcgggaggctg

SEQ ID NO: 765 - DNA, 299 bp, Homo sapiens
gggtctcccagggcagagatttatgttgattttgttccatgtgaggtctcaagcccttagggagagagcgaggcacgtgagggccttcatccaataaatgctgagagcagggatgggttttttttttttttttttttgaaaacaaagtttccttttttccccaaggttaaagggcgggggccttttttaatttcattgaaacctttgcctcccaggttaaagcatttttattccctaaccctcctaattacttgggattataggcccccccccccatccccattaaatttttgtttttt

SEQ ID NO: 766 - DNA, 395 bp, Homo sapiens
tttggccgagcggcctacggctgcgagagtacgacagaaggggaatggcccacgcccctgcacattgccctctccatcgctgtttgtctttctctctgcctctgattttccttatccttttagactatgagggaataggcatatagctgaatatgtttaagtcaaaaatctcattatatacacttgttgtatcccatttgagtatcttaacaagctgaagaggtagctagaaattattaagccatttcacaagtgaaaatatactgaagcttagtaggattacaagattgcgaataaaaatgcaagatatccagttaaattttaatatcagataagcaatgaatacttttttaggataagtatgtcctatgcaatatttgggacatacttgtact

SEQ ID NO: 767 - DNA, 589 bp, Homo sapiens
gacagaaggggcatggtgggagggcaggtgctggcaagtccgtgtggagtgggcacggcaaacaccctgcaggtagcggagtgtggactctgttctcttccctgtgaagagctttccgaggttctcagtctgaggggagtccagtctgtttcaggaagctcattgtgaactgtgaaatagaaacagttacaaatttgtaatgatttgccatttcctatgaactctgaaatgcacataatcagcttgtgttacaaagatctatttttaaaagtatatttattgcagtattattgatagcaataaaacctaaaacacgatctatatgtccaccaagagtgacctggtaaaaataaaataaaataaatactgtgctgatatgcacagacagtgaaatactattcagatctttatttatctatttagttgagacaagatctcattctgttgcccaggcaggctggagtacaggggcgcagtcacagctcactgcagcctccacctcccaggctcaagctatcctctcatctcagcctccccaggagctaaaactacaggtgcatgtcaccacacctggctaatttttaaaatg

SEQ ID NO: 768 - DNA, 402 bp, Homo sapiens
gttcttttggccgagcggcctacggctgcgagaagagacagaggggtctcctcactataacattagatgtcaaatgaattactttttgccatttttcttacaagatttttgatctcaaaaatgtgtaaatttatttttaactcttcttttttacttgtatctttttagtctaaattgaaaagcaacttttgtctttagagcatttatttctggcatctccattggaagattttttttttttcacacatcatacaaagcattacaggtgaaaagaaatgtaagtaataaaaaagtcttccaagaaaaaaaatgtgcgtgtgtgtgtgtgtgtgtgtgtgtgtgtgcgcgcgcgtgtgtgtgtataaatgaaggcacagaccctgtatgaaaaaagtaaaagtt

SEQ ID NO: 769 - DNA, 522 bp, Homo sapiens
  misc_feature 447: n = A,T,C or G
gggtgcttgaaagacgtaacaggcaactggatggctccatgcttgcttagtcagtcaaaaatccgtgaaacacttctttaggaaaaagggatagtgactgggagtaatgatgaagcagtgaaataaagagagggaagaggaagttgccttgagaagtaatgatcataactaggtgttattgggataggaaatgtaattaaattaggggcaaggggttgcagagctgagttaactgcagtgattaagaaaaaaaatctaggccgggcccggtggctcgcatctgtggtcccagcactttgggaggccgaggcgggcggatcgcgaggttaggggtttgggaccggcctggccagcacggtgaagccccgtctctactaggggtgccaagattagctgggcgtggtggtgcacacttgtggtcccggctgctcaggaggctgaggcggnggagtcgcttgagcccgggaggcggaggttgcggtgggccgagattgtgccactgtaactctagcatgggtgact

SEQ ID NO: 770 - DNA, 635 bp, Homo sapiens
ggccctgcctcagtctcccagtagctgggattacaggcactcaccaccatgtctggctaattttttgtattttagtagagacagggtttcaccatgttggccaagatgatcttgatctcctgacttcatgatctgcccgcctcggcctcccaaagtgctgggattacaggtgtgagccaccgcacccagccccctctgccttgaaaatactcacagcatcatctcaacagccaatacactgaaacccctctccacactgaagcacagttgtctgtgaagaaaaattagggaagccatagaggaacaatagctcctttgcaaattacagcttcatcagaaggaaagttgaggcaggcatatagtattttattttatacaccacaaacagacaacccctagacttggaattcagaattaacaaaagcattaaatccatcgggctttgagaagggtcaatgttttttcatatgtcttccctgctaccattatttgcataacaaatcgctgcaaaatgcgttcatgtcagatgttggaaataaactctttggggtatagctatttttaaacaacccatagttatacgggtgtttttaaaacattcaaagcctgagtttatgtttcaaatcataagtgat

SEQ ID NO: 771 - DNA, 476 bp, Homo sapiens
cgacagaagggtacttagtgcttgagttggggagggcctatgatagatgagattgctcaccctgatgctgccaattccaaatgcccatcttctcttctccatctcttctggtcaatagcttagctgtccttaaaggataaattcaacaccaacccagtttattctctgataccttccgttcctggaaatgagtgttttattttttccctccagactcctacagcagctcatttgtatctgtctagcctctctctctctctctctctctctctctctatctctctatttctctctctctctctctctctctctcacacacacacacacacacacacacacagagagagagagagagagagagaggggttaacattttccacctggcatataatttttggtatatatgacatatcccctactaagagaccacctccttagagacagcgctatttcccttcatttctatatatcacatt

SEQ ID NO: 772 - DNA, 523 bp, Homo sapiens
gggaatcccaatccaagtcatcatcagcccttgcttggactgttggatagagtccaatgtctgatctccctagtttcactctgacttctgtcctcaagtccacaaatcttcaagagtgatctttaatggtagcagtctgtttacatgactctcttgttctcacttatccaataacttagattaaattcttattactgaggtttatattcccaggacttgtgatgttcttccagaaagttttcctaagactcttcttggcaaacttacagataagttttatggatatttttgttttgttgtttttcctccacagtgtttgtctgattttttaaaaaaggaagaggaagctggatgtggtggctcacacctgtaatcccagcactttgggaggctgagatgggtggatcacttgagcttaggagttcgagaccagcctggacaacatggcgagatctcatctctactaaaaatacaaaaaaatttagcccggtgtggtggtgcatgcctgtattcccagctacct

SEQ ID NO: 773 - DNA, 654 bp, Homo sapiens
acggctgcgagagtacgacagagggtgtctgatcatgcattgtcagcatgctgtttctattaagataattgtataatgttctaatacttcagggtacttctctaccaatagggaagttgtattagtccattctcatgctgctaataaagacatactagagactgggtaatttataaagaaaaagaggtttagtggactcacagttccacatggcaggtgaggcctcaggaaacttacaatcatggcagaatgggaaggggtagcaaaggcatgccttgcatggtggcaggcaagagagcatttgcaggggaactcccctttataaacccaccaaatctcttgacacttattcactgtcacgagaacagctgggggaaaacccactcccatgattcaattacctcccaccaggtccctcccacaacacgtggggattatgggagctacaattcaagatgagatttgggtggggacacagccaaaccatatcagaagtgaaaagagtggaaaaggagaacaaacaattcctttgtacacatcattttcactcatgttccaatgatgtcgtacggccatacctggctgcaaaggagtctggaaactgcattctgtagttgagtggctatgtgtccagctaaattttattcacaagga

SEQ ID NO: 774 - DNA, 560 bp, Homo sapiens
  misc_feature 502: n = A,T,C or G
ttatgtgcaaagtatcatatagagaagtattctgagcaatgcccaggctgagtggaaggaacacagtgatctgtagcaatatgttagctcattgtatcaccacaaccatgtgaacaaccaattatttttaatccctattttacagattaagaaaccgagacatagagaggttaataatatgcccaagatatcacaaacagtaagtgatagagctgggattctatactctattgagtaaaacacaatttccctcttaagatgagtatgaggagagagggaaaagtaaagcgagctggcaattccagaggaaagagacaacatctgcttaaggaaaaccagtaaaaattgtttggagatggcagtggaaataaggtttgaaaaaaagttaagagttttaactacattataaataaatacctggaattggtgcaagcgcctcttatcagaaagaaaatggtgagaccaaccatacggaaaaagagatattaactgtgcacagaanatagtaatggcagggtcattatccattgttctatctcttgagcccaaattgtgaaggt

SEQ ID NO: 775 - DNA, 616 bp, Homo sapiens
ggagccgagcatggtggcgggagcctataatcccagctacttgggaggctgaggcgggagaattgcttgaacacgggaggtggaggttgcagtgagctgagaccgtgccacagcactccagcccgagtgacagagcaagaccccatctcaaacacacacacacacacacacacacacacacacaactgttttgtaagtctttttctcaataggaacattaaattttttaatattagtgttttgagttattaatttaagcttctcacaccataatcactaaaaagtttctttgacgaaaatgaaaaatctaaggatttttaatattgaaaggttagtaatctgtttagtcagccatttcactgttgtttttaaattcttagaattattgatgtatgttatctcaccctcccaagtagatgggactacaggcacacataccacgcccggctaattttttgtattttttgtgaagatgggttcccattacactgcccaggttggtctcaaactcctggtgtcaagcgatccgccgcttttgccttgaaaagtgctcttatctgaatacttttgacccaccgttggctgaagccatggatacagaatctgtggatttgga

SEQ ID NO: 776 - DNA, 561 bp, Homo sapiens
ttggccgagcggcctacggctgcgagagacgacagaggggtctctactaaaataaaaagatagctgggtgtggtggtgtgcgcctgtggtctcagctacttgggaggctgaggcaggagaattgtgtgagcccgggaggcagaggatgcagtgagccgagattgcaccattgcactccagcccaggtgatagtgagagactccgtctgttctgtagatttctgaagacaggtgaaactggaagagaaagcttagattataccactaaggggcctcagaagagatgggagcaagtctagcaaaatccaataggggggctttgggcctagaattagtgtgaaatcggactagaaatgatgattaattgagggcctatatagagaaaagatctcactcccatatccactcctgtgcatagaggacaaaagcagtaaacatttacacaggggccgggggtgggggttttcttaagaaaattgaaaaaactgtatggtgaggactagggcttggagtgcttacatcaatccccaaagaaaagcatttagagaaccatgagcctaac

SEQ ID NO: 777 - DNA, 541 bp, Homo sapiens
tttggccgagcggcctacggctgcgagaagagacagaggggttgagaggtggttcatctgaccaattagaaagtgattacaagggagaaaggacgaagacaggaaaagaactagaaagtctcccaacttgatctatagcttcaatgcaatcccaatcaaaattctagcaagttttttacagatatcaacaaactgattccaaattttatatggagaagcaaaagattcagaatagccaatgcaacattgaaggagaaaaacaaagttggaggactgacactaccagactttaagaattactgtaaagctacagtaatagtgtgatattggtgaaaaaatagacaaatagatcaaagaaatggaatacagagcctagaaatagactcacataaatacagttaactgatctttgacaaaggagcaacgttaatataataaagcaaagatagtgttttgaacaaactgtgctggaacaactggacatccacatacaaaaagtgaatatagacacagaccttatatccttcacaaaaagtaactc

SEQ ID NO: 778 - DNA, 498 bp, Homo sapiens
gggatgattaacctgactggcagtgccgctctccctctcgcgctctctctccttctccttttctctctctctccctcctgttccaatcagtctttttctcacacactctctctctccgtctctcctctctctccctctctctgtctcttgctctactgtttttttttcctctctctctctcctaaacgtggtctgcttgctgatggcagaatggcactcggagatttgtgcattgtgtctggtttcctacgggcaggctgacccagtgcctccagggacttatcaatagaccactcagaagagacacagacaggagagaggaggaggggtggggggagagagagagaatcaatatcaagaatagaaggagctccgaagccattttttttttaaagaagtatcgggacttgggagagggtgacaaagaaggtttttcaaagaggcagtggaggaggttctaataaatttggaaggaaacagttccctgtcttgggaaaa

SEQ ID NO: 779 - DNA, 506 bp, Homo sapiens
aatcttggctcactgcagcctccgcctcctgggttcaagcaattctcctgcctccgcctcccacgtagctgggattacaggcatgtgccaccatgccaactaatttttgtatttttagtagagacggggtttcaccatggccagactggtctcaaactcctgacctcatgatctgcctgcctcggcttcccaaagtgctggtattacaggcatgagccaacgtgcccagccgagagagtcacgtaatttagtggccagtctagggtgaggccccagacctttggactgctaggccattgccttccatttactataccattttattttcatattagttcattttattactacaaatatagaacacacttggtataaacttctaaacagtacagaaatatccagaattaaaacacgagtctcagcctgggcaatatagcaagaccctgtctctaaaaaatacatatttttttagttagccaggcatggtggcacgtgcctagtctcag

SEQ ID NO: 780 - DNA, 569 bp, Homo sapiens
tggaacagaggtgcagaggtggattttaatcttattgttgtttttgctttgttttgcctttccatttttgttgtatagttttagttgaaagagactttagagatgattaagtatacattacagttcggcctccacggtttacatgggggaaaactgaagcgcagaaagaaaaagtgacttgccttatgtcttgctagccttacttggtaattgagtagagctctcttgtctaatttacatataaaaggaaaactggagaagaaagagccttaggataatactcataagatctaaaattcctttagcctttcttctacatcaggcccactgggaccctacttaaaaccctcattttgacctggttcctcagtcagcatggagacaagcccgaggaaaaaactcaagagagccggcctccttccttaggtattattagagagcaatcccctataaaagttaagtggatgtttgttttttatttaaaaccttcaggagatttaaccctgctgggctgctcctgcctcacccacagcagtgtcccttcaggcctcacagaacacttctgccgt

SEQ ID NO: 781 - DNA, 633 bp, Homo sapiens
ttggccgagcggcctacggctgcgagaagagacagaagggatataaatttatatatatattcatttttgtaattcaagataacagagcttatcatttctaggcacaaggcttagcattttggtagcatagatataaatattctctaggaatagtgaatggtgagtaaagttaaaatgggaattagaaagatttccaggatattatcacccataaagatatattaaaataaagaaaatgaaattcaatatgtacatcagaatttcagatctagagcctacatctctgcattatttttatgcaaaagatttgtgatctattaaatctattttgagttctgcccatgaagatatatattttaaataaatattcttcttttacattggagtatctcccagatcccccacaccaaaaagagaactgtgagatataccagttattaataccagttattaaatcaacaactgggccaggcatggtgtctcatgcctgtaatcccagcactttgggaggccgaggtgggcagatcacaaggtcaggagatcaagaccatcctggccaacatggtgaaaccccacctctactaaaaatacaaaaattagctgggcgtggtggcgtgtgcctgtaatctcagc

SEQ ID NO: 782 - DNA, 555 bp, Homo sapiens
ggacaccaaccaattaaaggaatctacagattaattagactgttttttaaagaatgttgattacattttttccccatttcatggaacatggttatcatattgctgatgttggcagaatcttgatatttcagatgcaagacactaagctgtctttgctttcagccatcctaccatatgctctgatcccatcacatctcacaagctatgtaggtttgggccaggaccattcttggatgggaaatctctaagaatcacccagctgccacaagaagtaatgtagataactgagggaagcgtgttaccaattcactataaaatgaattactccaacagagcagtaggggcaaaggtctgactttatcatatgtcataaatgagaaaatcaaatttcactaccttctaagtattacagtttaaaaacaagtaccctcaaaaagcaaaatgaaatacagttcattttattttctcatcttatgtgatatcacccttgttatcttttccactacttattttaatcataatactagatcaccaacttggagccttatactttat

SEQ ID NO: 783 - DNA, 545 bp, Homo sapiens
cgacagaaggggactagcaaaaatgttttatgccagaaatagttttaaccatactgacagcaactaaaaccaagaaagacgaggtgtaaagtggggtgagggatggtaagcatttgttgggtttctgatatgttccagccaccatactaggtgctttatgaatgtgatctggcatatcttcatccacacacttttaggaagctgttagtgatgttcattttgtaccatcacaaggaaacggaagcttggagaggctaggctctgcctgtggttccccacagtcaggaactaaccagaaggcgggagacttgagaccttggcaccaggctgtcctacctccccagccaggggattcattacaattaaatgacagctacttccccacctccattgtatacccaagcagtgctcagattaaatgggggactgggaggaaaaatagaagccacttgatctttgcgtgtgtgctgatttacagatcaaagaaggttacaggaagttaggctaacacccttgttgcagtgatttctgtggccttatttata

SEQ ID NO: 784 - DNA, 532 bp, Homo sapiens
acgacagaagggggtctcacaactgaggggcctcggcggaggacacaagtcagacagagccacagactaaccgtacgaggtggctttttctctccagtccaggtcccctgaatgcgccagagcagacaagcttggacgtgaggaggcaagaggcagcgagaacaggcgcggagacggggctgggggagaagaggaagaaaccctgtgcttgtgcccttcccacgctcgcctgtcaccgggttagctgactggggaagtgttctctgagggtgcaattccttgcccttcccgtaagtcagctcccggggcgctgggtgagggtgcagccctgtccaccacggcgagccagcacactgaatcacggcagaagctgcttcctgtgtgggtgcagcctccctccctgcccaggactcagaagtcacgacagcatagagctttttaatcgtggctggtgccccttcaggaatctcctgagagccacagagaaactccagagtggctgggcacggtggctcatgcctgtgatcccagc

SEQ ID NO: 785 - DNA, 585 bp, Homo sapiens
acagagggatagaggtctttccagtcttagatttttatttagttttcttttccagtccatctccctagctgggtcttttatttgcttgtttgttttgttttccttcttgattttagtttatgttctcatgttctccttcagtgctccctgaatgttctctagaatttgattgtgagggcagtcagcatataaataaacaaccatatttagggagcattactataaaaggcagagtgttggcttgggagaatatgaagttgagtaaattatgttttctccttttgtagtgacatttcaataggtaataataatataaattactgtgtaatgactgttaaaagggagagatactataatagccttagaatatagagaatttcctttcagctataaagaatactctttaaaataatacctcaggatatatctagttatatacccattaaaataccatttcttttcttatgatggtctgtccaggtttcattttctcaaattctctttgctgaactcatacccatttatttttaaaaattatttattttaggcaggatatagtgactcacacctgtaatcccagcactt

SEQ ID NO: 786 - DNA, 493 bp, Homo sapiens
ggtaatgttgcatcttttacttttcattaatatcaagtacaaaatccatacttgatttttttcttttaaatgtttagaaatattcctggcttgccataatgtgttggttttatcactgttgatttcaactagctttgatctttctattggatatagtctatctttctaatcaaaacatttttatttcaatagttttaggggtacgaggggttttgggttacttgaatgaattgaatagtggtgaagtctggccatttacccattatgcaagtagtgtacattgtacccaacaggtaattttggaatctcccttcctcattctgaggctccagtgtccattataccactatgtattcctctttgtacccatagtttagctcacacctataagtgagaacatacagtatttgtttttccattcctgagttacttcacttaggaaaatggactccagttttatccaagttcctgcaaaaaacattcttttattctt

SEQ ID NO: 787 - DNA, 697 bp, Homo sapiens
agaagggagatattgtcaatatatttaatgcctagtaattctacaaatacgataatgcctaaattaacatgatagaacactatctaactagtgaacatggtaaaataacatacaactatgaaaatagcaagaatgtagaacatggcaatacataaaaatgtttacttgaaatattatacaaaaggcataagaaataatcatacaactctgtaaagattcatgtatgcatttgctacagagatgataaacactgtacagtgttttctactaaagttgcttacagtaatgttaaaaatgaaccaaacaagcataaaaataatggaaggaatggcaaagggaataagcaataaactggaatatataaaaactcaaaacatctatttgtcagaacacttcataaacaaaagcaaaatgcaaacaacaaactcagtaaaatgtatgttgcaaatatgtcaaagggattagatcctaaatatataaaaagctcataaactaaataaaaatgctaaagtgcccccttaaaaaagaggtaaataatatgaatttaaaaattcacaaaggaaaaaatacatatggtaataacagacaaaaattgtttggccttacgggcaataaaaaatgcaaatgaaaacaaaagatacatgactctacctatcaagtaagataaaaatatgatcatctttaatgctgacaagtg

SEQ ID NO: 788 - DNA, 564 bp, Homo sapiens
gctctagtgctaaggcatgcccacttctggggttcactattaacaaattcatttggctagtgtatctaaagcttctgttaataacaaaagtgttattttattctgttttgtttctcgtcttgttcatagcttaaccaaggaaggagttgtctgtttttgggtgctgcctttatacaccttatactattttatttaattttgcattaacttttattatttttgcgtgtgtgtgtgtgtgtgtgtgtgtgtgtgtgtatgtaatgtctggaaggatatgcatcatagttttaaaagggattggaaaaaggattcgtaaaattaagaggtttttccttgtctgtacttctaaattcatggaatttattagatatgtagttcagaaatagttaagccttttaagcctctaaaacagtatagtctgctctgactttccaaagcaatagtctttttggcacaagggaagaaggtgaaaacctgagtaggtatgttttgcctgcgtagcatttggtgcctggatttagaactttcagtaggcaaaaatgtattacttttctaaaaaccctg

SEQ ID NO: 789 - DNA, 617 bp, Homo sapiens
tttggccgagcggccttcggctgcgagagtcgacagagggtagaacatctattcaagtacttagttttgactcagtgaccactttcaatgtgtatagccaggaagttgcactatatagaaggatataggttttaagtttaagtaagtttaagagtatatgttatctgatttttttcaataaggggctaaataatttgaaatttctatatatttaggcttctagaatgttctcattaaattagtagatgtacatactgaaaaatattttaaatcaccgtaaaaatcctgagagatagatgtggtcaacctcactgaaagatgaatacactgaggtttataatattgtgaaacttacccaagctcatgtgattacagaatagagccggccggaagcggtggctcatgcctgcaatcccagcactttgggaggctgagacgggcagatcacgaggtcaggagattgagaccatcatggctaacacggtgaaaccccgtctctactaaaaatacaaaaaaaaaattagccggtcatggtggcaggcgcctgtagtcccagctactcgggaggctgaggcaggagaatggcgtgaacccgggaggcggagcttgcagtgagc

SEQ ID NO: 790 - DNA, 653 bp, Homo sapiens
acagagggggagcaatggcgggcgcccctcccgcagcctcgctgccgccttgcagttggatctcagactgctgtgctagcaatcagcgagactccgggggcgtaggaccctccgagccaggtgcgggatgtaatctcctggtgcgccgttttttaagccgatctgaaaaacgcaatattcgggtgggagtgatccgattttccagtgagatgaacccggtacctcagatggaaatgcagaaatcacccgtcttctgcgtcgctcacgctgggagctgtagaccggagctgttcctattcggccatcttggctcctccgcctcagaggtattatcgcttcagttccagatcaccacagtaaatactgcaatacaccaggtgcaagttgataaaagaattctggaaattgaaggccaaggaagagtgactcaaaaataagaagcaggctgaaaaatgagatgaggagaccgaggctcggagaggcttatgcatttgcccaagactctacaactccacaacttaacaggcaattgcatctagcatataatgtgttggttatccccagaacacagagcagtgcatctccacagcgagaattccagaacagggtaatcatcaagaatcaaatggcttggatctggtctcttctctttg

SEQ ID NO: 791 - DNA, 559 bp, Homo sapiens
cctacggctgcgagaagagacagagggaattgcaatccccttctggctgtctacagagttcatactcttcacaccacagctgggctgctaagggccaaatcctagctctgccttttaccggctttgcaaccttgggcaagttccttcagctctctagactcagtttcctaatctataaaatgggtttataatattactacagagtagtgataaagaatacatgggttagtgtacgcaaaatgctggagacaattaacatatgtgaatcctgtgacctgatacgcacccagcaaacccagcaccctccagctccaccatgacaacacagaggatgctcctctagcccagcaggagaagtcagctgcattgaggcttgaagggtgaataagaattatctgggtaggaaaaggagaacagcctcactggcagagtttttataaaggcaccaaagtctgaaaggcatgaagagtttagagggacccgttaacagtttagaacaactggatgaacattgcgtagaaggaaatggatactgcggataccacggagctcagcaagc

SEQ ID NO: 792 - DNA, 258 bp, Homo sapiens
gcttgttcttttggccgagcggcctacggctgcgagaagagacagagggaactcattctggagaagactctgaatgttggaaagtggccaggtgtggtggctcatgcctgtaatcccagcactttgggaggccaaggtgggagggttacttgaggccaggagttcaagaccagcctgggcaatatagtgagactctgtctctacaaaaaaaatttatttttttgagacagagtcttgctctgttgcccaggctggact

SEQ ID NO: 793 - DNA, 559 bp, Homo sapiens
gacagagggaacctcccaggcttaaccaatcctcccacctcagcctcctgagtagctgggattacacatgtgcgccaccacgcccagctaatttttgattttttgtagagacatagttttgccatgttgcccaggctggtctcgaactcctgagctcaagtgatctgcctgcctcagcctcccaaagtgttgggattacaggcataagcctcctctcccagcctctgcttctttttcattgaatcccctgcagcaccaccacgtgctctgctctcagtgccagctccttgttattccagagcaacttcagagtaatgggagctgtcggaatctgcctcactttttcacactttgctactctgccctgaccctgaattcacatagacccttttccatttctttcagcaccaagagaggcagtggggttgagggaaaagatctctgcttttggagctagatgaaacctgactctatcccttcttggctgtgtgaccttgggaaagtcatctgcctctctgagccttagtgtctcctttataaaacagggatataacagtat

SEQ ID NO: 794 - DNA, 523 bp, Homo sapiens
acgacagaagggatggtcaggtaagtagggattggtggaaagggttcttgcagcaagaatactgaaaattaaatgaattatggctttgtggatctatatagatagaactccaattggagatccaggtgaggggtctgccataaaccaaggtatctgacaaacaggcaaggccctaggcgagactctggactcagcagggaaaaccagagcctgaagcaggtacaccaggctgaaatcaaaccgacaaggagaacacaatagggcagtaaaggaaagcttgactcagtttgtgcatgggttcccatgcctcatccctgggactaggtagagtagggctcctcaaactcagcgctgtgaacagctggggctggacagtactctgttggtggggggttaccctctgcattgtagggtatttaatgacattcctcacctttacccactaggtgctattaattaatattccctcagctgtgacaaccatagatgtctccagaacattgacaatatctctgggtggaaa

SEQ ID NO: 795 - DNA, 664 bp, Homo sapiens
ctgacattaacacttattaccttattttattcctttaatgtattatcatatgtacactattacctctgttttaaagttgacactcaatatatgtaagtgacctccctaaggctatataactacaaatgagaaacagaagggaggtaagttttctgagcatccacttatagcaatgactgcactgggcatctaatcttcatgacgctatttaatctttcaatgattaatttgggatttaatcaatcccttaaccaagttagggattattatctgtgatggttaatgctgagtgtcaacttgattggattgaaaaatacaaagtgttaatttggggtgtgtctgtgagggtgttgccaaaggagattaacatttgagtcagtgggctggggaaggcagacccaccattaatctggtgggcacaatctaatcagctgccagtgaatataaagcaggcaaaaaacgtgaaaaagctgagactggcctagcctcccagcctacatctttttcacgtgctggatgcttcctgccctcaaacatcagactccaagttctttggtttttagactcagactggccctccttgctcctcaagcttgcagacagcctattgtgggaccttgtgatcatgtaatttaatacttaataaactccctctatatatata

SEQ ID NO: 796 - DNA, 520 bp, Homo sapiens
agtaaattcttttgttaaaatattagtggggttaaaaaatgccgtatagttaatacagttttacacagagaactgcacacacacacacacacacacacacacaaaatcctaatcttggcaaaagagagtggaagaaaaatacaccaaaaaatgttgctttttgttaatgttgggagtgatgatacagttttcaaaatatttattttcttctttttaatgtgttttttagcctttctgagatgaacagtttacattaaaaatacttactttaaaattgcttgcttacagaattaaaatacttcataatttctttgcaacttgagttttcagcttatcttctctatcctcctttctcttacacacggttcccttaccaggactggcaccgttcattttacaaaattttacaaaaattttaatgtgaatgccttcaacttgttccattttactacatggcccaccacatcttatttatattaggtccagctgcatcacacatttatgttatttgcctatccct

SEQ ID NO: 797 - DNA, 518 bp, Homo sapiens
  misc_feature 421: n = A,T,C or G
gggggatcctcccccatgacccaagtacctttcaccaggttccacctccaatgctagggattacatttcaacctgagatttgtacaggaacaaataacaaactatatcagcaggtcaccccttactgtatcataaatggctactgtcatccttatatggtacagaagctgcatctacatcatcatttcacaaaatgtggttaggatatatagtttaacaaatatttaatgaagacggtggtatgtcacaatagataaaaaataaatatagggacaacaggtatgcacaacatctctccttttcaaaagagaatctttgctgaaaccaaatacacacacacacacacacacacacacacacacacacataggtgtgtttttccctcccctaaaacaagagtagctcctcccctccaaagtanatactctgtcacttgagaggcaaaaaatcagtctgagatgtccatttctgacatagtggactagaatatgtgaactaacctcctaccatgaacgaat

SEQ ID NO: 798 - DNA, 458 bp, Homo sapiens
cctacggctgcgagaagagacagaagggcaagagaccagcagaatcctgagggagatgctgacaaatcataaaaagaccaagaatagccgggagtggctgctcaagcctgtgatcccagtactttttgagaggtggagtcaggaggatcacgtgagcccagcagtttgagaacaacctgggcaacatggtgagaccctgtttctacaaacatttcaaaaattagttgagcatggtggcatgtgcctagtcccagctcctcgggaggctgaggaaagaggattgcttgagcccaggaattagaggctgcaatgagctatgatcatgccactgcactccatcctggggagcagagctagactgtgtctcacaaaaaaaaaatttgtgggtgccaagactcaagaccatgggagctggtcgggcacagtggctgacatctgtgatctcagcactttgggag

SEQ ID NO: 799 - DNA, 683 bp, Homo sapiens
gtcaaacagttttctacaaggtttgtaccaatatgcactctcagcagtagcatgtaagagttctgattgctccacatcttccccaacattttatattgcctgtctttttcatcttagccatcctggtgaatatgtagtagtgtctcaatgggattttaatctgcataccttttatgaataagaagatggacagttttatatatttgctgggtatatgggtgtcctattttgtgacatacctctgtgtaataaatgtttcatttaaagagcagttgcatgtccattttgtatatgtgtccccaacctcagcagtcattgtccttttaacctgttttcaatttactcctacagtcattatcataatagtagccagtggcctattaattctcagctattacagtcatatttttttcattactatgtattgtggagctttatactgttacaattattacttatattattagtgatatctttttattcaaaatactattcttgactcatttttattataatcatcatccattacgtcataggcttcatagcaatcaacattgcatccctgtacctgctaagaatattttcagctacgagtatcagaaaactagcctagaggatcttaaacaaatagggtttttcacatgtaacaagaagtttctggtttgcgtcagctgctccatatc

SEQ ID NO: 800 - DNA, 516 bp, Homo sapiens
atgtatagtaaaacgaaaaagacagaaggattgccatgtaagttagattaatcattacttgtaggagggaggaaagatgtatggtttgaaagggacatttgggagtggctatacttgcttctaatattcgattttgtaatctgtaagtttgcaattgaagttatacacttgggatttagagtaggattgtcccttggagatataaagttaaatacaaatataaatcatcagctctgagatgcatttatagccaaggaaattcatgataccatgtaatgaaatgataacgaagagaagggcctacgacgagttctgaggagcactgaaaggttctatgttggagggaaaatctgcaaaggaaatagagacgaatattgaatgaagtaggaaagtctgtgtctctcaggagaattcttccaagcataagaagtaggcacctgtgtgaagtgcttcagagtaaaatgaggatagatgagtaggcaatcttgacaagggttatttccgaatgatggggac

SEQ ID NO: 801 - DNA, 408 bp, Homo sapiens
aaagacagaaggattgccatgtaagttagattaatcattacttgtaggagggaggaaagatgtatggtttgaaagggacatttgggagtggctatacttgcttctaatattcgattttgtaatctgtaagtttgcaattgaagttatacacttgggatttagagtaggattgtcccttggagatataaagttaaatacaaatataaatcatcagctctgagatgcatttatagccaaggaaattcatgataccatgtaatgaaatgataacgaagagaagggcctacgacgagttctgaggagcactgaaaggttctatgttggagggaaaatctgcaaaggaaatagagacgaatattgaatgaagtaggaaagtctgtgtctctcaggagaattcttccaagcata

SEQ ID NO: 802 - DNA, 542 bp, Homo sapiens
tgcttgttcttttggccgagcggcctacggctgcgagaagagacagaagggctcacatcagtaaaatctcaaactcatgtgttcaatatgaaatcctaaaaagcattccaatactaaattcataatgagtaagctggaagaagggtaatggaagtctaatcaaatccatccacacttacaatgaagaaactgaagtacagagaatcaacctgctagttaagagtagtagtttttcccatcaaaactaggtgagtgtttttatgtttgtttttgtacctttcctttgttggttgttgttttttttttttggcaaaaacttcttttccaaacaaatctattgggctaactcaatcttaaacagaaaaacacagaattactaaataagctaggaactccagtcctaggtatataccccaaagaattacaagtatataaaaccacacacaaaacctagtacacaatttttcatgggtgcattattcacaacagccaaaaaataaaaacaaccaaaatgtccatcaactaatgaacaaataaacaaa

SEQ ID NO: 803 - DNA, 582 bp, Homo sapiens
gctgcgagaagagacagagggggtagggcagactgtgcagtcccacgtaatttctctcatatctttgggccagtcctctttacccttgacatttcccttttttaggacttgaaacagtctcacttttcttaatgcccctacccagagataatcactctcttttatttagggaaatcaatatgtacacatttacagttttaaaaaataatatttgtgaccatggtgtatacggaactttgaccctggctgcttctgctcatttaacatcccattctaggcattttctgaagtctttgacaattatttgcaagcatgttgttaatggctgtacaatgttccattgaattgtaggtaacaacaacacaagtacagctggcccttgaacaacacgggattgaactttgtgggccagttttatacagatttttttcaataaatacattggaaaattttattggaaatttgcaacaatttgaaaaaactgacagatgaaatgcataacctagaaatattgaaaaaaattcagaaaaagttagatatgtcctgaatgcattaaatatacgtacatactagtctatttta

SEQ ID NO: 804 - DNA, 723 bp, Homo sapiens
tttggccgagcggcctacggctgcgagaagagacagaaggggaatcaatttacatggacttgttccagatttgcgtctactctttttgccctgtggagagaaggttatttggtgtagattggtaaaactcaaatgacagcatattttctccctctctctgcagtatcatctgccagtggctttcaagtaggaacagacatcaggatcagctggagagctggttacaatacagatgccgaggcccacccccagagtttctaaatcagtaaagctggatgaggcctgagaatttgagtttttaacaaattcttaggtgatgctgatccagggaccatgactcaagaaccactgtcaaatagggatatattttagatattttatagttacatgttgctattattcatccattagtgtatagccaacctttccagctgtgttcactgggatgccttcctttagcgctgaagattaataaatctgtagctaaatttaagaaaacattgcaagaagttgagttcttaagtcagtaaccaagccaatattaaattcttgcttatcactatctgaagtaatttcattactttatgcatttattgtctccattgcctacttgatgaaggcagggaatctccctccctttctcattgctctagtctgaacaactggaccggtgtttggtacatagcagactctctggaaatacttgtaaagtgagtcaatact

SEQ ID NO: 805 - DNA, 523 bp, Homo sapiens
  misc_feature 454: n = A,T,C or G
gtgtgtgtggctttgtgctgttccacttctgaacaatatgctatattatgtcttggcaagcatgtatcctgacatttaaaaagtagatgaagaaaatataattatgctctatagaacagggctccccaaaccccagttctagggaccagtactgtttagtgctgcacagcaggaggtgagcggctggcaagcagtactgcctgagttccgcctcccgtgagatcagcagtggcattagattctcataggagtgcgaacttccttgcaaactgctcatgtgcatgtgaagggtctaagttgtgcgctcctcatgagaatctaaggcctgatgatctaaggtggagtagtttcatcctgaaatggtaccctcctcctcttctgtggaaaaattgcctgcattaaacggctccctggtgccaaaaagtctgggaactgccgctctagaatactctgnttttctttctttctctttttctctctctccctgtccctctgtctctgtttctctctttctctctcactt

SEQ ID NO: 806 - DNA, 719 bp, Homo sapiens
acagaagggaacccctcctctttcttctttcctcagcctttttaatgggataatgatgaggatgaagaactttatgatgatgcacttccacttaatgaatagtaaatatattttctcttccatataattttttattaacattctcttttctctagcttactttattgtaagaatacagtatataatacatataacataaaatacgtgttaatcaactgtttctattattgatgaggcttctgtttaacagtagactaatagtgattaagttttgggggagtcagaagttacaaattaattttcaactacagggactgttgacattcctaatccccatgttcaagggctaaaatttgcaccatcacatcaggggctaggacttctatatattcaaattcagagctcacctagattctgaaaattttactcctagatcaaaaattgatattatagtttgtgaaaagtgggaaggagaaagtagtttccttaaacaccacttgaatttttaaccagactgcttatattcagattaaagtagaactgataactcttactttggagtagaaaaacctaatcatggcagtgatgggggagaatgtcttctccctcattccactcattttcttcactgtctctaggtcatagttgcatgtttgtgatgtagaaaaaaacgtataacatttttaacataatgtaactgagaaagtggatatacagta

SEQ ID NO: 807 - DNA, 585 bp, Homo sapiens
cgacagaagggaacatggcaaaaccctgtctctactaaaagtacaaaaaaaaaaattagctgggcatggtggcgggcgcctgtaatcccacctactcgggaggctaaggcaggaaaatcacttggacccgggaggcggaggttgcagtaagccgaaatcacaccattgcactccagcctgggcgacaagagtctcaaaaaaaataaattatattaaattaaaaaataaaaataaataaaaaccatcccttgtcttacaaagggatatagctgagggccctgaaaggctccagggctggctcaagtcaaagagccaatctgcacagagcccggctccttccactgctcccagctgattttcaaccccaactcattcaaccacattctgacctccttggcttaacccctccactagcatctaaaaattgtgaatcacatcacccactgtgcatcacacactgtgcacatatgaccagtttcttggctttgatgtaaacatggctttcctcttgttaaactaccattaaaaggaagaaaaggagatgaatggggagaaggagcaaatgaaggcggatcaagggagtga

SEQ ID NO: 808 - DNA, 652 bp, Homo sapiens
cataaaaatagatgcccaagaatgtttattgaaaaaagctgaaaacccatgactatctcaataggacaatgacaggatacacaatggtttatcatgccctgacctgcgagcagtgaccaagaaggagggcacagatcacacagcagacagacagatgctctgaggcttacgatggggttatatcatgatgagcccattggaagttgaaaatgccgtaagtgaaaagtgcatggcaaactgggagctgctgccgctgctgctgcccagcatcacaagagaagtacactttctgaatgtctattgctttgcaccattgtaaaaagccacaaaatcatataggtcgaaccattaagtcagagaccctctgtgcatagacttggcattggcccatgacaagtgaaaagagtaagctacagaataatattcatacaatcatccatttttataaaaccaacttatagatatgtatttaagtttttgcgtgtttatcaagcagaataaaaatgtatagaaaacggtaccaatttggcagcaattacagcagaaagacagcatggcaggcgacaggagaatgccatcagtactactttggatgcccctgtaatctttcattgataccgagagcatatatgaagtttgtaattgaaataat

SEQ ID NO: 809 - DNA, 678 bp, Homo sapiens
cgacagaagggcccgtggtcccagctactcgggaggctagggcaggggaatagcttgaacctgagaggcggaggttgcagtaagccaagatggcgccactgcactccagcctggggacaaagcaagactccgtctcaaaaaaaagaaaaaagaaaaaaaaagaaaaaaaactatatatatatattcgcacataaataaaaatgtacaccaatgccagttctcccatcctcagacagtcaattctctcacttttcggaacctcgtgaaaaaagccttggagaatttggagaatctataatttcagaatttgaagaaataaagtaaatattttgaacaaatattattgaagcaagtaaatgtttgtttaaattaatttaccaatgaaaaatgaaatattaaaaaactagacgcaccttaagaaaatgaatttggggacaacattctaggcagggctgacttgacaatatcctgaatccttctgcccagaataatacagacacaaacacacaaacgctattttcatgtgatcccatggtttgaaattccaccagtcagagatgcatatgggttaagcatctgaatgtacaaacacatcagggttgatggaagttctctgctatacgtggagggctcggaggggaaatggtgaggggagtaataattttggaatgtgaaaag

SEQ ID NO: 810 - DNA, 528 bp, Homo sapiens
cagacacaaagatggcaacaataaacactgagaattacaaaacagaggagggggacaagtgtttaaaaactacctatctggtattatgttcattacttgggtgacaggatcattagaagcccaagcctcagcatcacacaatatacccatgtaacaaacctgcatatgtaccctctgaatctaaaattaaaaagaaaaagaaaaggtttgtgggagaaagagatgtatgaaatacacacacacacacacacacacacacacacaacacacacacacacacgcaccaacaaaaaacaatccacctgatgtttaaggatctcggaaactaaagactgctctattacacttgttctttgatgatagagacagcaatatctctaactgctggcattggccacttcgttactaaccctaagataatctgcacatggaggccactgaattgtcatgctgggtatgttttaccagtgagtgattgcagtggctgaaggggatccacgcttctatttaaaacagtgattgtatgtg

SEQ ID NO: 811 - DNA, 667 bp, Homo sapiens
ttgcttgttgttttggccgagcggcctaggctgcgagaagagacagaagggattgtaacctctttagtttttgagacaacttagcggagcttggcgtatggtttatattcaagaaacaggtaatggggttctgaacataaaagaatgagttagcaactgagctgttaatgaaatgccccaggagattcctgtaatatgaacagttatagtatagtatgaagagccctaagggcacagtggctcatgcctgtaatgctagcattttgggaggccgaggtgggtggatcgtttgagcccaggagttcaagacctgcctgggcaacatggtgaaactctgactctacaaaaaaaatacagaaattagccgggcatggtggtgtatgcgtgtagttccagctacttgggaggctcaggttggaggatggcttgagcccgggaggtggagattgcagtgagccgagatcgtaccactgcactccagcctaggcaacagagtgagactccatctcttaagagaaaatggagtgataaagtcaggcacagtggtgcacacctgtggtcccagctctgcaggaggatctcttgagcttggagtctgaggccatcctgggcaacatagtgagatcccatctcttcgggaaaaaaaaaaaaaaaaaaaaaaaaaaaa

SEQ ID NO: 812 - DNA, 477 bp, Homo sapiens
aaagaatgtttctgaaggagcctgagaaatctcttccccttctagagacgcttgctctgccgggagctagaaaggaacggatctccatgctctggacctcattagcgaaccttaccttggaggcagctgagagccctcccgaggggtcctgatcctgggcaccagctcgctctgtgatctacctaagcccttcaatcccccgactctgcaatgtgaaatccaaatgctcccggtgtccttgtagctctgtcaccctggattcttgtggcaaagagagatggatctcagtgggaggctggttttggatggagggccacagggactcatggtcttggtggtggttacagatttcttgagaaatgtcattctttggccgggcacagtggctcacgcctgtaatccagcactctgggaggctgaggcaggaagatcacttaagggcaggagtgcgagaccagcctgcataacatagggaaa

SEQ ID NO: 813 - DNA, 583 bp, Homo sapiens
ggtaaggtctcttgtgattactttggtcccatctgaataatccaggataatctcctcatctcaagatcctgaatttaatcatattggcaaagtcccctttgccatataaagttacatattcataggttctaggggttaggatgtggacatctttgggatgccattattctgcctatcatagttaccttaatatggaagtgtctaaatcgttgaattgttttaactaagatttaaaatgctgattaatgtcaatagacaattgatatcaaatatttaaattcatttttttaaaacaggagatgggaggcatttaaagagtcacccagggttttcaggggacatttttcaaataatatatgcctccagggagattctgatatacttccctcggaggtaaaagtcataccgcttagttgagaatactggaatgccatatgcagatgaactatatgaagacctaaaaaacgactcacagttcagaaccagtgagttgaatttttactaagaactatcagaaagttgaggcattaactggatttagatatgttattcccatgtattccaaatgctaataatttctgac

SEQ ID NO: 814 - DNA, 635 bp, Homo sapiens
gcttgttcttttggccgagcggcctacggctgcgagaagagacagaagggcaaagacagaagcaggctgtcttagatggaagaagcaaaccagtcttacttgaaagttttgtctctcatctaattgtatttcaaccattacctatctatgcattatcttctgagtgctgatcccgtatttctgactggatgttattatgtggatgtttcttaacatcactaatcattagagaaatgcaaattaaaaccacaatgagatgtcacaccgcacccattaggttggatactattaaacaaacaaacaaacaaaaaacaggcggggcgtgatggctcaagcctgtaatcccagcactttgggaggccgaggcaggtagataacttgaggacaggagttcgagaccagccttgccaacgtggtggaacctcgtctctaccaaaaatataaaaaattagccgggcatggctgggcacggtagctcacgcctgctagctcccagcactttgggaggccgaggcaggtggatcacaaggtcaggagttcgagaccagcctaatcaacatggtgaaaccccatctctactaaaaatacaaaaattagctgggcgtggtggcacacgcctgtaatcccagctactc

SEQ ID NO: 815 - DNA, 492 bp, Homo sapiens
acgacagaagggagacaagatgtcttgctttatttaaactaatctcaaacttctggcttcaagcaatcctcttgcctcagcctcccaaatttctgggattatatagggataagccatcatgctttaggttttttcattcacagctgtgggctcgttagcaacagtggcaactgtgctttcctgtgttaaatttattatagccctgggattttagaatacgccctgtttggggaaatacttttggatgtccttgaatgtctgaaccatggagaatccttgtcagaaaaaaaaaacaaacaactttgtacctgacttttcgtggggtaaaggtttcagagtcttttaacgccttttagagagtagcttcttacttgatataattatgtctttacccccaaagtctggttttcagagtagataggtaaataaaccttaatgaaattaattattggctgggcgcggtggctcacgcctgtaatcccagcactttgg

SEQ ID NO: 816 - DNA, 237 bp, Homo sapiens
tttggccgagcggcctacggctgcgagaatcgacagaagggtatcctatagttccaggatgacgatgatgatggttgtgataatgatggtgatagtaatggtgatgctgctgctgctgatggtggtgatgatgatgttggtgatgatgctgttggtggtagtggtggtggtggtggtgatgttggtgatgatgttattggtggtagtggtggtggtggtgatgttgatgatgatgct

SEQ ID NO: 817 - DNA, 610 bp, Homo sapiens
gcttgttcttttggccgagcggcctacggctgcgagaagagacagagggcttgttcacctatgtaatccgcattgactaggacattgcattgttgcacaaaatgcataattattttttgttaaactaacaaatacataattaaaaatataaataagaatgaacatcccagaataacagagtaagaagctcagcaaattctctctcaagcaaaccagcaataaaactggaaaaattactggaaacaaccatttcaagtgtgaaaaatgatcaaatggcataaagcaaattcaggagcatttattcaagaaaaattagtgattcctaataagaaaagttggagtctatgatatttaagctgggatctgttttcccctccgcttctcagatacagctttgaggtacaaaactttcacactgggtagggcaaggcagaccttaaagactgacaactcccattctttccagacccatgttacacagcatctgttgtgggcaagtagagaatactgctacatccaacagcttccattacctgtggcaccttattgtggaagttctaaacaaggtcatggctggtcataagaacttgcagctcttcaaccctgccca

SEQ ID NO: 818 - DNA, 685 bp, Homo sapiens
gcttgttgcttttggaccgagcggcctacggctgcgagaagagacagagggtcatgggaatgaagagaccacagcttgatcaggggtccctaaacaatcagggtgaccatgcatttccacatgctgctttggcagggaacaatcttctatgcctttccatatgcacgtggcctcgtcctcccccacagaacgcacccagaagtggaattgctggttcagcatggcccctcctccaccagtccctgccatccctgggtcaagccaacttttatccaaccctttctgtactcctgccctgcagaggtgggggatgtcatagatgcagccaccaaatagtggatggctgttcccagagttctgtgtccttcttaagagccttggtctggccaggcacggtggctcacacctgtaatcccagtactttgggaggccaaggcgggtggatcacctgaggttgggagtttgagaccagcctgaccaacatggagaaaccctgtctctactaaagatacaaaattagctgggtgtagtggcgcatgcctgcgatcccagctacttgggaggctgaggcaggagaatcgtctgaacccgggaggcggaggttgcggtgagccgagatcacgccattgcactccagcctgggcgacaagagtgaaactccatctaaaaaaaaaaaaaaaaaaaa

SEQ ID NO: 819 - DNA, 515 bp, Homo sapiens
ttggccgagcggcctacggctgcgagagtcgacagagggactcaggctggtctcgaacccctgggctcaaacaatcctcccgcctcagcctcccaaatactgggactacaggcatgagccatggcacccagcctgttatttgtttacatgtctttctcctctcctaaactgtaagccccttgaaggcggtgtgggtgctacctctggccctatgacagcatcaccttcttctgaccctcataactgaacaaatctttggagtgttaactgtgttcttagaacagagaacagatgttatcaaccttgataatgtaaaagtaaaaacatagttgaaaaatgtagagaaatggaaaggagaagaaaggggagaatgagctgtaagcacaaaggacaaaaatgggagagtcaagggatggtgccttgagcccatggaaaaagcaatagagggccgggcgcagtggctctaccctgtaatctcagcactttgggaggcagaggcgggtggatcgcctgag

SEQ ID NO: 820 - DNA, 576 bp, Homo sapiens
gcttgttgttttggccgagcggcctacggctgcgagaagagacagagggcggccgacactccttctttagagaagcctcagttgtacttttaagacctatcacctgattgaatcagggccactcaggtgatcttatttaaaatcaactgattattcacttaatcacacctgcaaaatacagcaatgccttaattaatgcttgattaaataactatagattggacgtaaggctagccaagctgacacataaacctaaccactataatttcctatcaaaatggtttcaaagttgactgctttagttttctatagtaatagtaaagaagaaaactaatagccaggagagaagatgtagtgacaccctatgtagtgtaagtatcctcctaggtccctatccagaaatctgaaatagacatttttcaaaaagacatgaataggctgggtacatggtggctcacgcctataatcccagcactttggcaggctgaggtgggcagatcatttgaggtcaggagttcgagggcagccttgccaacatggtgaaaccctgtccctactaaaaatacaaaaattagt

SEQ ID NO: 821 - DNA, 578 bp, Homo sapiens
atccaagtcctaggctatttttaaatttatgaatcgttttgtcatgtgaagttgcatttataagcccactatttttacatataaatttaaatgataagaaactcatcaataggaaaggtagcgtggtgtagaggttaggagctggactctaaggccagctgcttgtgttcaaatcctaacccctgggtttcctctctgtgatgtgatgagaacaacggaaacacttaacagagtcataagacttaaattagttgatatgtacacgtgctcagaacagcacctggctgataataaggccaaataggcttattgcaacttgtttatttgtcctctccaatttcatattgtcatctagttctttcttcaccaaaagacgggagcatcatagaaggaggaatgagaggttggccctagagtgtttaacatagacttagcccatagatggccttctgtaaatctctgtggaattgattgacagttacccaataaatatacacttttcctagacatctaacatcgtttaaacaatttcttggccaggcttggtggctcatgcctgtaatcctagcactttggga

SEQ ID NO: 822 - DNA, 608 bp, Homo sapiens
acagagggtattgtttgtatacattaaggctattgatttttgtttgttaattttatatcctaccaccttattattttttgttagtttgttgattctgtaggattttctcattagattatcatattatctgcaaacagacaattctatttgatgtgtctaattaatttatcttgtctaattgcactggtgaatacgctaatataattttcagtaatagggaagagagtgggtattcttgccttgttagtaatcttagtgaaaacacttttaatgttttcccattaaataagataccagatttaggatttagacaacacacacacacaagcatatgcatacatacacgtatacacatataaagaaagcatttctcttttactattctcttgagtgtttctattctctggagtgttaaaacatttctgagttcggctgggcacagtggctcactcctgtaatcccagtactttggaggccaaggtgagcagatcacctgaggtcaggagttcgagaccagcctggccaacatggcaaaaccctgtctctactaaaaatacaaaaattagccacacatggtggtgcacacctgtaatcccagctactcggga

SEQ ID NO: 823 - DNA, 568 bp, Homo sapiens
ggtcccatggactgtcccatcacgccagagcttgtttcctggcttctagtcattgcgtcccccgactgcagccagagggcttctgttgaaactgaagtcagatggagccccacttttgctcctgcctccctgtggcatgtcatctcatcagggcgggatgcctgggtccagtcgcctgatgctggaggcttcacgtacctgccgtgccccctccagctccccactatcccactgacacctgcttactcctgcctaaggcctttgtataatgcctggtctgcctggaaggtcacccccagattcctgcatggccccttccctcacttcctacgggtgtctgcttaaaattagaaaaccctggactgggcgtggtggctcatgcctgtaatcccagcagtttgggaggccgaggtgggtggatcacctgaggtcaggagttcgagaccagcctggccaacatggtgaaaccccatctctactaaaaatacaaaaattatctgggcatggtggtgcttgcctataatcccagctactagggtggctgaggcaggagaatcgcttgaacccg

SEQ ID NO: 824 - DNA, 565 bp, Homo sapiens
ggctacagtgaaaggcttgagattctgcagataccctcagagcaggtgtttacataaacgcaacagttacaggaccaccccatatgccagccttggcataagatgtggtttataaggacagggcatggtggctcacgcctgtaatcccagaactttggaaggtttaggcgggtggattattagagctcaggagttcgagaccagcctgggcaacatggcaaaaccccatttctacaaaaagaacaataacaacaacaaaaaattaggcgtggtggtgcatgcttgcagtctcagctccttggggggctgaggcaggaggattgcttgaacctggatattgtggctatagtgagctgagatcacaccactgcacttcggcctgggcaacaaagtaataccctgtcccccactcccccccaaaaaaaagaaaaagaaaaaggtgatggagactggaggctgaggacacctgcttgagcagacccagctctgtgaaaaaggaggaattggcagcactggatggtggatcagttctgaggaatgatggcaacctttgacagactcagga

SEQ ID NO: 825 - DNA, 615 bp, Homo sapiens
aatcaaacagtgacaagtgtatgactcaaacatgtctggtgacctctgctgggccacccagcaggctctcagcagatggcaactgttttaggcttgcacaggcatgtcttgtgaccttctcagggtcacaccgatggaaaacaggaacttaaaaaatccttacaaacttacagaaatagttacaaaaatagttatgagagcagagcaaagaaatattggcctgggaaagaatctcaaagggggaagctgataagaacttgtttttctcatccctgttcctggagtccattccttctgggctcttcctggtcttgtatataaagttatcttagtcctagcagggccttggactgagtcagcctggaacaggccagaacttaggtttttctctttttaatttctgctttagtaggccaaggttctgattgtcactgctgagaaagtaaggtgtgttcaggctgcccatggttctgggctcccccacgtctctgaggagggctgtcccctccatcacagagaatatcaggacactagcctgttcctagttatacttatacactcctctcatgttgtctgtggagtggatgctgcagggagggtgacatcccagttagt

SEQ ID NO: 826 - DNA, 659 bp, Homo sapiens
  misc_feature 581: n = A,T,C or G
acagaaggggtaatgaacattgatatatagttttttgtgtagataccctctttcattccttttggatatgtacctaggagtagaatttttggtggattatatggtaactctatgtttaactgtttgaggaactgccaaattatcttcccaagcaactactctattttacgttcccaccagcagtatatgaggattccaatgtctctactttcttggtaatatactgttattatcttttttataatagggtatttttttcttccttcacatgcattttctagtttttctattaagcattagtcatgtgtctgaggaaaaggtctttaaacacatttattagacaattatgtgactatattgttctaaaagcaatataattaaagattacaatatatgtgaaccttaatcttcaaatgaataaattttattccttatagtatacttctgggtcatttttacatcttataatattaaaattctttttatggatttgctgagggttttattgtttgttttcttaagaaggtaaggtaaagaggttaaatttaaggtttaaactgaaaaacagaacttttatattntaacaaaaaatacttattgaaatatgtttaacccatgtattatctcactaaatttatgttcctgatttttctaaatct

SEQ ID NO: 827 - DNA, 640 bp, Homo sapiens
gagggcatatactctttcactctgtgtcccaaatacacggttggacgtggagaagataggaaatgatgccaccaataccctatcccagggaccaggaaaccttttctgtaaagggccagacagcaaatattttaagctgtgcaaagcatactgtctgtgttgcaactacctacctcaccactgtagctacagtagctatacatgatttataaacaaatgaacatggatgtgtgccaataagactttattcataaaaacaagtgacaagttggagttggcctgtggttcatagtttaccaagccccacaatcctcaatcccacccccatcattctctgacctcaactcccaccacaattccccctgctctcttccacagagccacactggtctccagcacactcccaccccagggtctcttcattccagaccctctgtctggaatgttctttcatcagatttgcctgggtggtcaccacctcatctcttcagctctttagtcaaatgtgacatttttggtaatatttcctcatatttctttactattttcttttgttttgtttgcttgctttggagacagttttgctgttgtcacccaggctatagtgcaatggtgcaatatcagctcactgtaacctctg

SEQ ID NO: 828 - DNA, 490 bp, Homo sapiens
  misc_feature 121: n = A,T,C or G
ggccacaaatattaaaaaaaaatattagtttttagattcacagaagaaaaaaatagccactgacacttgaggagatgctcaattccgatgagggacattcaaagttactttccaacattantctgaaaagtattgatccttttttttttttttttaaaacccagtgtctttttgttgcccaggttacagggcaggggcataattttggttaattgaaattcccacccccaaaattaaagcatttttcctgcctaaccctcccaagaagcgggaataacgggtttgccccaccacttccagttaatttttgttttttaagggaaaacagggtttccccgggttaaaccaggtggaactcctaacctaaaatgatccccccatttaaccctgccaaagggctggaattacgggcttgacccattgcccacacccaaaagtttttatcctttttttgggggttatatgtgggaaaaaaaaaccgggaaaaaaa

SEQ ID NO: 829 - DNA, 526 bp, Homo sapiens
acagaaggggtgtgtatatgtgtatgtgtcatatgtgtgtgaatgtgtgtataaaatattaataggaaatatacttaaaggaatatgatactggctaaaataaaggatagcaaatatcttttttgttttaaagcttttgtgttttaaagttttaaaagcattatagttttatatcatcttgacattatttattctcctaacacagcagttctcaaaagtacctaagaatcaccttgagacctagtttaaacattggattgttgggtcatgtacccaaatattctcatttgagaggccaggttggggtctagaaattgaattttccaattgcaccagatgattttggtacaatagaaagaaatattaccatttttcttttctggatcatatggagtgagatatttggtgaaatttttctgtgtacacccaatgaattagctgggcagtgattaaaactgaagtccttgggccaggagcggtggccaacacctgtaatcctagcacttttggaggctgaggtgggcag

SEQ ID NO: 830 - DNA, 586 bp, Homo sapiens
gcttgttcttttggccgagcggcctacggctgcgagaatacacagaagggtattctcttctcttcctggactgtcaaattttgccttctgtaagtacctaggaggttacctttggtaaagttaagaagctagaaatatcagctcactgcatcctctgcctcctgggttcaagtgattctactgcctcagtaccctgagtagctggggttacaggcctgtgccattacacccggctaatttttgtattttcagtagagtcagggtttaaccatgttggccaggctggtctgaaactcctgaagctcctaaagtgatccacctgcctaggcctcccaaagtgctaggattacagatgtgagccaccacacccagccacattttttttaaataaatagagacagggtctcactatattgtccaggctggtctccaactcctggccttgagtttttgtaggcaggcactttaagaggggatagggttatcctgaggatgtggcctttagctattagaaattatgttattgcctgtaatcataatactttgggaggctgaggcaggagggttgcttgaacccaggagttta

SEQ ID NO: 831 - DNA, 636 bp, Homo sapiens
ggcctacggctgcgagaagacgacgaggggtttcttaaattttctgttgtcctgttgtgtaataggaagctcatgatctaatctgattacctttcttattttgagaaaggtaccagtccgatccattctgatgcttggaagaaaatagcaaatagcaaatagcaacttaagtcatgaggagatgttcagaagttttgttttggtctcattctttattatgtctaatcaggatacagttttagattttaagaatacctatcgtcagagcttagatgtgatagtcatccagaaacataagtttttccagataccactttaacacactgcacaatttatcctttcacctgttggttctttttttctgttttttgtttttgtttttgtcttttttgggaggccacggtgggtggatcacctgaggtcaggagtttgagaccagcctgaccaacatggtgaagccctgtcactactaaaaatacaaaaaaaattggctgggtgtggtggtgggtgcctgtggtcccagctacttgggaggctgaggcgggagaatcgcttgaacctgggaggcggaggttgcagtgagccgagattgcgccattgcaccactccagcctgggcgacaggagtgaaaatcta

SEQ ID NO: 832 - DNA, 582 bp, Homo sapiens
aaaaacacaacgaatacatacttaagccttagaagatattaatcaaaataaattaaaagcaatgaagatatctctgtatgaaagaatatcagacaacaaacaaaactttaagtgaaatcaatattgtgaatgccataaaatttaacataaatgctaacaaatagcacaaataccatactgattctaacaagaaacagatgtccttaaagatggttaattttgcaaagacaacataggttggacttgaagaagaaaacaaaaagttatcggttttgatttttatttcaaaaaataataatgaaatattattgtgaaaatcatagaaacccactggtagaattagaaagaatgatgactttttacattacagtagaagactaaaaacaaacatatatatcttacactgcaaatgacaggaaacaaaggcaaccaaaaagaaatagagaaaacaaaactgggaacataaaacaaagtgacagaattaaagctacacataacagtgataacagtgaaggaaattgctttaaactattctgtttattcagaagcaaatattgtcaggaagaattacaaaactacatc

SEQ ID NO: 833 - DNA, 462 bp, Homo sapiens
cgacagaaggggaactgatagttgctagatggctctgaatacagaggagagggtagtatgttcataggctaagccaaggagggccttgtaggctgtgttaaggcttttggcctttaagagcaataagaaagtaaaggattttaaactgaggagagagagcatgattagcacttaaaaaaaaaaatttgagcatagtgaaaatggatctgaaggggatgtagtgtggatgtaggttaggaggctgttgcagtagcccaggccagagatgatggcttccagcaaaatattgacagtgggaatggaaaagtaaaaggattcaagagtttagaggtgaagctgacagaagttgctcgtggttggtgttggaacttgagagtgaaggtggttggaactgttctgacgtttctgccttaagcagcatcatggattatgggcctactcactcacattgggattgctgga

SEQ ID NO: 834 - DNA, 538 bp, Homo sapiens
ggaagagtctactgctcccaaatatctctgctacccactggccattgctttacattcctcaactaagctttcaccttttagtactaacctttgatgactgatcaaatacaaatgccccaagaagactgaggataggagaaagaatatctctacctgtgaaacattgttagactgcctggctaggagttcattgttgttttctgaaggacgtaaccaaccactccaaaacttacaggcttaaaacaacaaacatgtatcatttcttatgattctgtgggttggctgggtggttcttctggctgaggcaggatggtctaggatagctacatccacatgtctggggtcccagctgagatgactggggctgttgaggcctttctccctgtggtgtcatcctccagaaggctgcccagatttgtccatatggtagcaggagtttcctcgaagcaagagagggcaagatccgacacagaagcacttttcaagctctgtttccatcacatttgccaatgtctcactgatgaacacaagttccatg

SEQ ID NO: 835 - DNA, 599 bp, Homo sapiens
gctctagtgctaaggcatgcccacttctggggttcactattaacaaattcatttggctagtgtatctaaagcttctgttaataacaaaagtgttattttattctgttttgtttctcgtcttgttcatagcttaaccaaggaaggagttgtctgtttttgggtgctgcctttatacaccttatactattttatttaattttgcattaacttttattatttttgcgtgtgtgtgtgtgtgtgtgtgtgtgtgtgtgtatgtaatgtctggaaggatatgcatcatagttttaaaagggattggaaaaaggattcaaaaaattaagaggtttttccttgtctgcacttctaaattcatggaatatattagatatgtagctcagaaatagttaagccttttaagcctctaacacagtatagtctgctctgactttccaaagcaatagtctttttggcacaagggaagaaggtgaaaacctgagtaggtatgttttgcctgcgtagcatttggtgcctggatttagaactttcagtacgcaaaaatgtattacttttctaaaaaccctggtttgtcatttcatcacatgtcaaaacaattgctt

SEQ ID NO: 836 - DNA, 550 bp, Homo sapiens
ttgttcttttggccgagcggcctacggctgcgagaagagacagagggactaatcaaatcactttcatttaataaaaattaatcagaagatcattaattactggggcagccaagtgtcctaatttgtcacagactgaggggtgtcttcagtctcatggacatgggactttccatgctaaaactagggcagtccctgggatagttcctggcaagcaaaactgttggtcattcttttcctaagcaataatgagggaagatgaaagcaaaagcagacatgaaaatctctccaagccatgaaaaagaagtggtagcaacagcagtactttcccttcttcatcagtgagagcactctgggaattgtatcagctggagaatagccaggtaaggtttcaaactgacttttgtaccatgacagtcatgctgggaccctgcttaactttcaatctgacatcaagaatgggagggataatgcagattttttaagagagagagagaaaaagagactctatactgcattatgtaggtaaataaatctaaaaaagtctctttta

SEQ ID NO: 837 - DNA, 646 bp, Homo sapiens
gctcctgttcttaaaagtcttgtctccagcttcatactgaagctgtccaacttctctatacatagaaaagtcattacctatcctgacttcctgtttcttcctgttacttactacagtctctccttttatatactcattctggaattatttttctctacatcctttttcttaacaagtagtaaactataaactcttcttttatacttaaatttaatcaccatttctcaagaagaaaattttctaaaatctccatcaggttcctcattgacacattttcaaagtgcatatcctatatgcatgtagtgtaattcttcaatttatctaccccaattagaatataaatccaatgagggcagggatttcattaccttttcttgcattccattatactgtagcacatggcacagaattctgcaaataaaactattcaatatctatatttaagaaaattagtgaaggaaagaataaatctgatacacatgaataataattacttttttcagtagtaacattggatttttttttctgagcagttgacctcttcattatatttaaatatgtattaaatcaatgaatgttcaaaaatgtatgaaaataaatcacttatttatcatagttgtgtccatttagaagttagtactttcaa

SEQ ID NO: 838 - DNA, 404 bp, Homo sapiens
attatatattaatttttaagagccaatttaaaaaaccttaaattttgtcctgatgtactgtattagaaatagcaaagtgctgggattacaggcgtaagccgctgcgcctggccagtgcttggtcatttcttaggcaggctagatggactcagaattcccaaattgcatttgaagaataggggacaccattttgaagtgctgaaaaattggctaaatgtaatgttttgttgctgacattactttaaaggtttgtggaggagagatttaaatgtattttattatcctcagtgtttctagttctgttttcaggttcatttcactagttgaagcaaagtttttatatgaacatttttattgagcaatatgatatcctagtatgtagtccagaaagtacagtaaaaagc

SEQ ID NO: 839 - DNA, 595 bp, Homo sapiens
acagaggggtccctgatcccagccatccagcaccctgggtggtagctggaagtttgcccagctgagaaagattgttctttttctctcccttttttatttatttatttttttgtgtgtgtggtggtggtgatggtgctggtgctggtggtttcttttgtcttgtatttatgtaaaaagtttatttgctgctcttgaaagatctcagcatgtggccccagagtctttacagaccaggttccctgtggccactttctctgtaagtttcttcaccacagttctgatggttggtcttcatgctgatgtcagtgctgttttgatccaaactgtagattatttttacctgtgaatttctgaataagcattagattaacacatttgtttttgaaatcaaatgtgcgttgaggtgaaacacgttctgctagaaagctcataaagccattttgcccctggggacatacaggtttttatgaaaaaataatgaaaatattttaaaagcttgttaaaatttgtatagatgggcatatgtaaaacacatgctatttaaatactgatatgaaaataagttaggaatgaaatagaaagaaaaatgatttgc

SEQ ID NO: 840 - DNA, 642 bp, Homo sapiens
acagagggggatctcagactgctgtgctagcaatcagcgagactccgggggcgtaggaccctccgagccaggtgcgggatgtaatctcctggtgcgccgttttttaagccgatctgaaaaacgcaatattcgggtgggagtgatccgattttccagtgagatgaacccggtacctcagatggaaatgcagaaatcacccgtcttccgcgtcgctcacgctgggagctgtagaccggagctgttcctattcggccatcttggctcctccgcctcagaggtgcaagttgataaaagaattctggaaattgaaggccaaggaagagtgactcaaaaataagaagcaggctgaaaaatgagatgaggagaccgaggctcggagaggcttatgcatttgcccaagactctacaactccacaacttaacaggcaattgcatctagcatataatgtgttggttatccccagaacacagagcagtgcatctccacagcgagaattccagaacagggtaatcatcaagaatcaaatggcttggatctggtctcttctctttgaggaagcaagcaggcatggaggtgagtcaggccattggaagatttcctgtggctgatgaagaatccaactccaggttgctcttctttga

SEQ ID NO: 841 - DNA, 597 bp, Homo sapiens
ggggaaggggcgaggcaaggccctcctgaatacctcaacccaaatcttcaagaaatccccaagtcctcacagtgctttttgtggatttttgtggaaaccggtaaaaggggctgatttgctgaccccagtgggtagaaaatagagactgtcaagagaacagaagagaaggcagaaaggggatggggaagtggggttcgccatgttcacgagctcctggagccacagggccccccaggaacaacagagctgagactgggtggccttgtttctggcccaattccctgggaccaccaccctggatgacacttgagccctactcaaggacccaccacaacatctcagcattgtcggtccttaaatgccaaggtttgtgctcaccatttccatccttaagattctcacagggaagaacccacacaacagctttgtccctgcgactctgggtgagtttctgacactggcctgggctcccgttttgcccgtcaccaacttctcacagtataactatccaagagaagtagcatttgatgtcagggaatcaaaagggctaaggctcgggaggccaaggcaggtgaatcacttgtaatcaggagttcg

SEQ ID NO: 842 - DNA, 646 bp, Homo sapiens
gaggagagataggtccatcctcatgtagccgggagaattgcagaatgaaattgctcccagtattactagtaaaccttcaaatttcatttactggggcagagatagttccggttttaaggaaataatagaaaatcatggtctgaaaattctcaaacctgaaaggtgatattccatttcaggcagaagaagaatttgctcctcaaaatagaaatgttgaaagagaaggaagttgacgtttaaaaaaagtagttgtgaaatagcagctgtttcttttagctctgatattcaataaaaataaaatttattttgcctttaattgtattttatttgcccatcatacataaaagtacttacattatatatgaaatattgtatatatcaggaacaagtgtaaagcttcatgaacaatttggagtgacttatagttttcttaatttaattatttttactttagtgtgctctaccagcagtttccactactatttaaaccttataaacatcttccagacattgaatatgactcttctgtttgtttaaccttgaattgtatctgtcttaggaatgaaaacaagattggtattttcataggaaaatttggtaatcttaattgcttggaatggactgtaattcaatttggaactttttt

SEQ ID NO: 843 - DNA, 280 bp, Homo sapiens
acagagggtactggtatggtttggttctgtgtccccacccaaatctcacctctaattgtaatccccacatgtcaggggaaggagctggtgggagttgactggatcatgggggtagtttctcatgatagttagggagtgagttctcacaagatctgatgatttaaaagtgtctggcagttttcctctctccctctctctctctctctctctctctctctctctctcttgaccccccgtgtaaaatgtgccgctcttccctatcctcttacaatgtgagtga

SEQ ID NO: 844 - DNA, 630 bp, Homo sapiens
aggtcccacatttgaccaaggagtgcctggtagcgttgagatgtgggagagaatgcactgatctgaaggcagccctgcgtcaggaattcagcaacctggaagaggtacaaaaggggtccctctcctggtcagctacagtggaggaagctaggcagggtcgctaacctggtcactctgacaccagctttcacaggcttattctttctgcctttgataagtcagacttctgatcatctgattgcatgtttgccctcctctaacctggtctagaattattctggaaaatctgatgaggagttggggaggacatgccatgaattgcttcctttcccagagtcaccccatccccctgagtagctctgcatggcttctgtagcttctgccaatgaggtcaaggtctgtaaaggttaggggttgtgtttggctgctgaagtctaactactgtaaattcatgttgtaagggtttactctctcacataacattctttctcacgtattataagggtttattctcacacatacggtggctcacacctgtgatcccagcgcttggggaggctgaagcaggaggatcacttgagcctagaagtttaagaccagcctgggcaacatggcaagacccctcctcta

SEQ ID NO: 845 - DNA, 564 bp, Homo sapiens
gaccttgcaatgctaagggtccctaattctttaactctagttatgtaatctacataaatgagttattttcagaagtttttgcacactgtatatgttatctgttcacatttactgtaattcaagaagcactgatcaaatttcactaggactaaccggaatagctttcttcctttacatgaggtcagttaggttacaggcttcttattaaaatgcaaataaatatcatcagtaattagtaaatgacagggagtattataaacttccataatgattctatgccattatgacactatagaaagttaagaaaatttaacatatgaatatattaactcctgatgttcattataccatagacttgggaacactgtacataagagaaaagagtaaaaatatagtgtcagaggctggaggcaggaggatcacttgaccccaggagctcaagaccagcctaggcaacatagcaaaaccctgtctctacaaaaaatacaaaattagccagttgtggtggtgtgagcctatagtcccagttacttgggaggctgaagtgggaggatcactcaagtc

SEQ ID NO: 846 - DNA, 464 bp, Homo sapiens
ttgcttgttcttttggccgagcggcctaggctgcgagaagagacagagggctaatacaaaattagccaggtgaggtagcatgcatctatagtcccagctagttgggaggcagaggcagaagaatcatttgagcccaggaggtcaaggctgcagtgagccatgatggtgccactgcagtacagcccagagtgagaccatgtctcaaaacataaacaaacaaaaaccaaaagtcatactgaggaagagaaatatgaaattataatagctgcatggagcacagggaaaaaatgtaaagactaggtaactttgaaggtttcatttaaaataatttttgttaagaaaacacggcaggccgggcatggtggctcacgcctgtaatccccagcactttgggaggccaaggcgggcagatcaggaggtcaggagatcgagaccatcctggctaacacagtgaatctccgtct

SEQ ID NO: 847 - DNA, 576 bp, Homo sapiens
ccgtgttccctgatgtctagggcttcagctgggaataacttgaatggctgaggctggaacagctgaacctggaggatccacttccaagatggcttcccctctcccgtgcctcttccctgggctgaaggcctgactcagctggaaatgttgaccaggatgccaatgtgaagtactagggtagcccatctcttataggactatgtagccctccaagagcaagtgttcccagtgaccaaggtcatggcctttgatgacctagccttaaaagtcacacagcgtcacttccactgggaactgtgagccacctaagttcaagggagtagacattgactctaccttgtacaggatggagtagcaaagaatttaggatcatgcttaaagctaccgcatcttactcatcatctccctcactagaaattaagctctgtgacacagggacttctgtatcccatgtattagtcacagatctctagagaaatagaaccaagaggatatatagagaaatatataaatggaggtttatagtacggtagagtagctcacacctgctagtaatttcagcactttgggaagctg

SEQ ID NO: 848 - DNA, 683 bp, Homo sapiens
cataataatctagaccttgaaatgacccaggtttccatcagcaggacaattgctaaattgtggtatgtttacacaatataatactactcagcaattaaaaggaacaactactgaaacacaaaacaagtatgttgagcaaaacagataacaaaaatacaatctatataattccagttacatgataatcaagagcaggtgacactaacttgtggtgctgtaagtcagaaagtggttgccagtgattgggactgactatagaagtgcacagttgaacatcggtggaaaagatacatgtcttgtctggggtagtggtttcatgatttttatggttagcaaaatcctttcagctgagctgttcaaatttctacatttcattgtaaaatatactgtaatttatttaagttacagtatgataaggaaaacttagtggtagggaatggacttaaaagattaatattgttgaacatattacctagttatttagggaaataaaattagcttagagcctcacttcacactttgtgtccaaataaattttcgtttagcctagagttcagtaatagatgtttttaaattgtccctttggaaccactttagataggtcattgatacagtgctaaagtgtgtgagaccaaccaactcaacctagttcacccagaacattcatggttttagaactgaat

SEQ ID NO: 849 - DNA, 423 bp, Homo sapiens
gggaaaattaaggggtggatcatgcagacatttctagaaaaggtgtgacaacttccgggtcatcgggtcattgtcatggaaagtggtggtaacttctgggtgttgccatggcaatggcaaactgacatggcaccctggtcagtgtgtcttatgggaaagtgtttttgccccatccctgttttagttaatcatcaattaggtctggtgtccaagcctcacctccagaatccagtactgcctcctacctcattagaattgttttcactgtgcgtcaacatgatcattcctctgttttaacaagggaataaacttaatgaacttcaacttcaggggattttttttttaaatgcaatttgaggaccgggcgcggtggctcacgcctgtaatcccagcactttgggaagccgaggcgggcggatcacg

SEQ ID NO: 850 - DNA, 418 bp, Homo sapiens
ttaatctgggagaaaacagggaaataaagtggccagaggctagtagctactgctttgttgcttcaagagaaggaagtatgagcctctatgaaggggttgaggttttttgctggggactttggggcacagaatgtaaaaaaaaaactgcgtctggacaatagtcagctatgaagtatttaaaaatgtaaaggggctgggtgcagtggcttgtgcctgtaatcccagcactttgggaggccgaggctggtggattacctgaggtcaggagtttaagaccagcctgatcaatatggtgaaaccccgtctctactaaaatacaaaatttagcccagcatggtggtgtgcaactgtagtcccagctaattgggaggctgagacaggagaattgcttgaacctgggaggcggaggttgcagtga

SEQ ID NO: 851 - DNA, 654 bp, Homo sapiens
  misc_feature 577: n = A,T,C or G
gcttgttcttttggccgagcggcctacggctgcgagaagagacagaggggtgttctctagacggacagaactaataggatagataaatatataaaggggagtttattaagtattaacttacatgatcacaaggtctcacagtaggtcatctgcaagctgaggagcaaggagagccaggaatcccaaaactgaagaacttggagtctgatgtttgagagcaggaagcatctaacacgggagaaagatgtaggctgggaggctaggtcaggccagtcttttcatgtttgtctgcctgctttatattctagccactctggcagctgattaggtggtacccacctagattaagggtaggtctgcctttcccagcccactgattcaaatgttaatctcctttggcaacatcctcacagacacacccaggataaatactttgcatccttcagtccaatcaagtcgacactcagtattaaccatcacaatcacaatactgaattttcatggcagtcatcttgaaaatgtttcagatcattaatgtgtttaattttgaacttgtagcaacttgatacataaactntgcttttgaatcatgcaaatgtgagcaagacgaagcagggtaaatcctcttctgcatttaatactatcagaaacaag

SEQ ID NO: 852 - DNA, 694 bp, Homo sapiens
tttggccgagcggcctacggctgcgagaagagacagaagggtgatgactatgacttttcgagcctgagtgactaagagtttgagagaaatataaaagtcaggagggatgccctgttactgaaagaaatgtgtttctttaatttaaatatattaaataatcatggaaatgccttgcagaccggtatagaaataagaagggagttttgttcaaagggcaggggtgaacttttagtttgctgtgtaataattcaagccatgaaacaaaggaatgaaaggcctgtcaatattctcacaccagaccattagaggcatatctatagttgaataagttgggtttgtaacttgttgcaaataagggagactacacatcatgcagaattgtgtggcatttcagttaagagggtgttagaaatgacattacaggattggggcttgtgttaggttattcagtggagagttcaagatagtgggactttggctacagctgtaatttgtaaataagcaacagttattcttattagctgggatgaggggatgcttgctataattgtagtttacatagtgatcttgttttcatctgtgcttagacaaaattacaaagtgttcttggttttgtctcacttcactctggttacagagtggccttgtctgatgttggtgttcaataaaatcgtttggtgggtatgtttgcttc

SEQ ID NO: 853 - DNA, 445 bp, Homo sapiens
acagaaggggggcatggtagctcatgcctgtaatcccagcactttgggaggccgaggtgggtggatcacctgagctcaggagttcgagaccagcctggccaacatgctgaaaccccatctctactaaaaatacaaaaaattagctgggcctggccacatgcgcctgtagtcccagctactcggaaggctgaggcaggagaatccctcgaacctgggaggtggaagttgcagtgagctgggatcgcgccactgcactccagcctgggcaacagagcgtgactccggctaaaaacaaaaaactaatttgcattattttaagtccattttcttttcttttctttttttttgcccattgaacatgagaccagtgctcattctcctagaagatgctgataatatttgtcaccctgtagcacccccagtgtttttctttgttttttttttt

SEQ ID NO: 854 - DNA, 580 bp, Homo sapiens
ttggccgagcggcctacggctgcgagaagagacagaggggccatttgaatcttctgtattcttgctatctttgcccctttgtcatctgtttgaccttgtaccaccagtttatacaactctaggggaattgtttacacagagctttgttctcaagtgactatgcatcaaaatcgcccatgaaatttttattttcatttgtttacttatttattttttagagacaaggtctcactttgttgcctaggctggagtgcaatgacacaatcatagctcactgtaacttcaaactcctgggctcaagcaatcttcctgcctcagcctcctgagtacctggaatgtaggtgtgtgccatcacgcccagacaacccccataaagtttttaaaatgcaaacacctgttacctacccccatgctgattcactgtctctgaggtgaggcctagaaaacagcatttgtaaaggccccatatgattataatgaacaatcaagatcaagaagccctattttgggtctggtgcggttgcttatgcctgtaatcacagtactttggtaggctgaggtggacatatcacttgagctc

SEQ ID NO: 855 - DNA, 337 bp, Homo sapiens
ggcctacggctgcgagaagagacagaaggggagaatcacttgaacctggcaggcagaggttgcggtgagctgagatcatgccattgcactccagcctgggcaacaaaagcaaaactctgtctcaaaaaaaaaaaaaaaaccctaaaaaaaggccttttggtttaaattttttttccaccacataagggactacctgggttggaattttttaggggggggggcccacagtttttggaaggttgaggggagaaaaaacttggtaaccaaaggttgtcctgggatccaaatgtaatccaaataaattttttaaaaaaccacccctcccccaaatgggggg

SEQ ID NO: 856 - DNA, 350 bp, Homo sapiens
tttggccgagcggcctacggctgcgagaagagacagaaggggatttttcctttctaattgaactaatatagaatcttcttttcttgtctaatctagctaatgatctatgaatttagtttatcttttcaaaaaccaccttttttttcattgatcttttgcagtttcttttgtttcaatttcatttagttctgctctgatctttgttatttcttttatgctagctttgggtttaatctgttcttttttttttttttttaaaacaaagtctatttttgttccccaggaagtgcaggggggcaatttaacttaattgaaccctttgcctccggggttaaagcaattttcctgcc

SEQ ID NO: 857 - DNA, 647 bp, Homo sapiens
  misc_feature 567: n = A,T,C or G
tgcttgttcttttggccgagcggcctacggctgcgagaagagacagaagggatcatagataatagacatacatcagagagttgtttgtagattaagccagttaatttaagcagactgctggaacagtgtctggtttataataagtgttagctattttatagttttggtttaatttgtaacagagaaatccttggcattatcagttttggagtaagacacaaaatgaacattttaatcattatggaagtaattcatacccattgcctcatgctggaaagcaaatggaaaagagactaaacagcactcaaaacatgatgcccaaggtgactgccatttgtggttgatctatttctctttgtgaattgagatctgcataacaaaaccgtattgtaagtacaagtttgagcctaattattttcacttaacatatatgataagcatttccccataataaaacaattattcataactttaatggctgcataatgtaatcatattgattaatcgtaatgtgtgacacattttcttagtgatgaacatttagtttctttctttctctttgagtanggggtgggggcagctgttacatatggtgctggtggccaacagtcatgcatatatattcatttacatatatattttttctt

SEQ ID NO: 858 - DNA, 664 bp, Homo sapiens
ctacggtctgcgaggagacgacagaagaggattagcatatatattttatgttataaaaattaaatactgtgttctcataattaaactagagaaaacgttaaaaatcataagagaaaatatatttgctatttattaagtggaaatggatcattgtaaagtctacatcctcactgtcctcacattgagtaagctgaggaggaagaggaggggttggtcttgctgtcacaggtgacagaggtagaaaatccttgtataataagtgagctcatgcagctcaaacccatcttgttcaagggtcaactgtacttgaatggatttttttccctgtcataattaaccacccacacacatcttactagaccaaaaaagaaaacttgtcaagcaaataatctcccatttcttgggtcatttggagagataacacaggccaggttatatgtcctgaaagatgagaatgtgtgaagtccccagagagtctgatacgaggccttcttccagggagtagtggtctggccgctgcaccagcctgccccctgccatgccctgactcacctgcacatcatgggtgctgctgatgcccaggcttcatggctgagcatggcacccttagcacccctcacctgttacccaacggagatttgtgggtcggaggcatttcaattgg

SEQ ID NO: 859 - DNA, 556 bp, Homo sapiens
gtataatgagattagaccaaaacaaacaaaactggggaggaagacagagaggaagtaggcttgtaggttaagaagtagggcttccggctgagcgcagtggctcgcgcctgtggtcccagcacttgggaggccggggcgggtggatcacttgaggtcgggagttcgagaccagcctggccaacatggcggggcccagtctctaccgaaggtgcaaaaattagctgggtgtggtggtgggtgcctgtggtcccagctgcttgggaggctgaggcaggagaatcgcttgaaccagggaggcggaggttgcagtgagccgagatcgcacccactgcaccccagcctgtgcgacagggcgagattctgtctcaaaaaaaaggggggcttccttctctgaggtttggcagtatctgcagggacacctaggtgattgacctcaggataccatgaagagaggagaggtgacaaaaacatgtaccctccaactcctttccccaacagttccaatgcacttggcaggaaaggcaaagggtgctaggagtttaaaatcaatattgtc

SEQ ID NO: 860 - DNA, 525 bp, Homo sapiens
acagaagggacatgggggaagttttcaaagagaaagagggctgcactgggttcttgaagactgaacaggtggtttgtgcaggcaggatgggaacagcatattgtcctgcatggactctgcccccctcaaagctctggtcagggcctaaggtcacagtaaattgtcataattttctactaatgccctttcttttagataattctctgaaaccactatgtgcacttgttcttttaaagcacggtacctttttctttttttgttttatttctaaaataaagatgaaacaaccaactctgaaactgattaagttttagaaaaccaccaggacgtattaagatctagtagcggccgggcatagtggctcacgcctgtaatcccagcactttgagaggccgaggcgggcagatcatgaggtcaggagattgagaccatcctggccaacatggtgaaatgaaactccatctctactaaaaatacaaaaattagctggatgtggtggcgtgtgcctgtaatcccagctactcg

SEQ ID NO: 861 - DNA, 431 bp, Homo sapiens
  misc_feature 55: n = A,T,C or G
acgacagaagggaactgattatgtaataattatctcgacacactgtaagtttggngaaaaattaacaatgggccaggcgcggtggctcatgcctatagtcccagcactttgggaggccgaggcaggtggatcacctgaggtcaggagtttaagaccagcctgaacaacatggcaaaaccccttgtctgctaaaaatacaaaaattatccaggcatgttggtgcatgcctgtaatcccagctactcgggagtagctgaagcaggagaatcacttgaacctgggaggcggaggttgcaatgagctgagaccgcgccactgcactccagcctgggtcacagagcaagactccgtccccactcccgaaaaaaaaaaaaaattaacaaagtacacatttttatactgaaaggtgttcatgaattccgatggattca

SEQ ID NO: 862 - DNA, 533 bp, Homo sapiens
cgacagaagggatccccactgcctcaaaagtgtctggcacatagtaaacatttgttgaatgaataatgtttataaatgagtgttttcatttttgtagactctaccagaaaatcttacatataacttaaagtttagaaaaatttagagaatagtgtgtcagtatcttggtggagatgagaattagaggaaaatgctaaataatttctagatttggtttctaacattattcagtttaaataagactggctgaattgtaagatgtctaaacatctttaagacatttttgctgtgctgtaaaataaaggtatttgttcatttcacagaatcactgtaaggctttatttttatttaaatcttagaatgtttgtacatagagcttggccgggcgcagtggctcacgcctgtaatcccagcacattgggaggccgaggcgggtggatcacctgaggtcaggagttcgagaccagcctgacaaacatggagaaaccctgtctctactaaaaatgcaaaaattagccgggcatggtggcaca

SEQ ID NO: 863 - DNA, 427 bp, Homo sapiens
  misc_feature 367: n = A,T,C or G
cagacattaatcatttatttgtgttgggaacatttcaaatattttcttctagttattttgaaatatacaataaactattgttaaccacagttaccctactgtgtgtatgtttgtactgattaatcaacttctcttcctccccaaccccctccaccctccatacctccctccaccctccccagtttctagtaatcatcatttgactctctacctccatgagatcaattttttcaagacgggttttttatgtgctgtttgcaggtttgtaacatcacatcctcttcctttttttctctttccattttaacattctttgcacttcctcacctttaacttctccatcacttcgctttcaatgagagacaanagagctttgtgaggcacgtttttccaaaccgtttactatgataggctttgcaatcattct

SEQ ID NO: 864 - DNA, 425 bp, Homo sapiens
ctcctggtgcgctgttttttaagcccgtcggaaaagcacagtattagggtgggagtgacccgcttttccaggtgccctctgtcacccctttctttgactaggaaagggactccctgaccccttgcgcttcccgagtgaggcaatacctctccctgctttggctcgcgcatggtgcgctgcaccccctgtcctgcgcccactgtctggcactccctagtgaggtgaacccggtacctcagatggaaatgtagaaatcacccatcttctgtgtcgctcacgctgagagctgtagaccagagttgttcctattcggtcatcttggctgccctccgggccattcttcaaaagtaaacattttaaacagtggaatgctaatgttatttctaataacaagtatgtcctctattatcattattatcattatc

SEQ ID NO: 865 - DNA, 592 bp, Homo sapiens
acagagggggcgaattctcagggcccccgcaggcctgggagcggcctgtgataactggtgtatctggcaggagtagcagctgccccttggcgcgactgctggagccgcgaactagagaaacacagacacgcctcatagagcaacggcgtctctcggagcgtgaagcccgccaagctcgagctgagctttcgcttgccgtccaccactgcccaccactgtcgtttgctgccatcgcagacctgctgctgacttccatccctctggatccggcaaggtgtgtgctgtgctcctgatccagcaaggtgcccattgccagtcccgattgggctaaaggcttgccattgttcctgcacggctaagtgcctgggttcatcctaatcgagctgaacactagtcactgggttctacggttctcttccatgacccacggcttctaatagagctataacactcaccacatggcctaagattccattccttggaatccgtgaggccaagaaccccaggtcagagaacacgaggcttgccaccatcttggaagcgacccaccaccatcttggaagtggctcgccaccatcttgggagctctgtg

SEQ ID NO: 866 - DNA, 517 bp, Homo sapiens
acagaagggatgatcttagagctacaatgcatgtcctctcatgaattttgagctacaattttctaatagaatttcttctaagctatagtcagctatatcattcattcatcatttgttccttcaccaaactcatatttattgaacacctatcctaggccataccctgtcatatctccacattataatctccctgaaagcagtttgccttcatatttttttactgtctaatctggtgtcactggatgttcagtaagtatttgctggattgagttgaatgatgtctttccatcaaaaccaaagcttaggtaggctatctgagtgccttcataccttgttgtattgagaatagcacaggtctttagagccagacagaccagagttctaatctcaactctgtcactgaccagctgtgaaaccttgggcaagttacccaactataaagtgcctcattgttttctccattgtaaaatgggaacagtaatgcctatctcatagggtagttgttgggattcagtaa

SEQ ID NO: 867 - DNA, 548 bp, Homo sapiens
aatctcttccccttctagagacgcttgctctgccgggagctagaaaggaacggatctccatgctctggacctcattagcgaaccttaccttggaggcagctgagagccctcccgaggggtcctgatcctgggcaccagctcgctctgtgatctacctaagcccttcaatcccccgactctgcaatgtgaaatccaaatgctcccggtgtccttgtagctctgtcaccctggattcttgtggcaaagagagatggatctcagtgggaggctggttttggatggagggccacagggactcatggtcttggtggtggttacagatttcttgagaaatgtcattctttggccgggcacagtggctcacgcctgtaatccagcactctgggaggctgaggcaggaagatcacttaagggcaggagtgcgagaccagcctgcataacatagggaaacccggtttctatgaaaaattaaaaaattagctgggtgtggtggtgcgcacctgtagttccagctacttggaggctgacgtgggaagatcacgtgagcc

SEQ ID NO: 868 - DNA, 362 bp, Homo sapiens
tcctcatttgtcttctgattttgcctatggtattttttgacacacataaattttttatttgtatataactttttttttttttgaggcaggaggatggttggaccccaaagttggaaaccaccctggccaacatagggaaaccttgtttttataaaaaattaaaaaattagccatacttggggggatgaatgcctggggcccctgggcctcccaaagggctggaattacaggggggacccatcaccccgggttacttttatataataaaattaatcaatagtttttttaacggtttcggaattttgaggcatggttaaaaaaagccttactttccaggattataaaggaaatggcccgggttt

SEQ ID NO: 869 - DNA, 510 bp, Homo sapiens
attttgtagaaccttccatttgactgatgaagagacaggctcagaaaggctaagcgctgagcttaaagtcaacaatatgttagtagcaaacacagtctttttccttgaccaatggttttcaaaatgtgagattccagagtcctggataattgtttctcttctgaagtatttttaactagtttgaaaactggaaatgcaaacactcaaacacactgacttaggctgccaggaaagttcattcttatgcagatctgggaatttcgcatatatttgaacttcttttttttttaacatagaaacagggtctcggtctaccacccaggctggacagcagtggtgcaatcatagctctctgcaaccttgagctcctgggttcaagtgatccttctgcctcagcctcccaagtagttagtgctacaggcatgcaccaccatgcccagcctgatgagggcagagatctattttgaaaacagaactcggaaaactatggggcaacactgccttgccctc

SEQ ID NO: 870 - DNA, 587 bp, Homo sapiens
gagatgaggaaactgaggcacagagaggttaaaggatttgccataggaagtatgtgataggcgacttgaatccagacagtttgatgtcagagatcatgcttttaacacatgctatattgcctcaaggaaatggatttagtaaatggcagttgttattattgttattgctatttttagtctcttcgcttctcttctcctgcagagtggaaggtaagggagggtgcacaagtgtttgcaggtaatgaagtgtatgtggggcttttatcacctccacagcctaaacctggatcttgtcatgctaggaaatcaagctacaatggaacattgatttttgctggtcactatgaggcctggagggtcgcggagtcccctggtgcactcaaactttatctttctatcaattagcttacacatctctagaatgtggatggatagaaaccctcctagattacagaatcaaaccaccaatattctggccccaattagtgacataacttcaattcagctagtaacttcgaggctcactttcttccccttggcttcaaaaggctgtttcattccagtgttctacaagaccccttccgcct

SEQ ID NO: 871 - DNA, 384 bp, Homo sapiens
ataaaatatgtgcagctggtcatgtctcagactttctttctgaaactcgtgaccactgggaggttagataagcaccttcttgaggggttagttgtgtttccaattctttaagacctagctgcagaacaccttggtatgcaggggtcaacatggtggatttgcttcaaaatggtgtcactcttgccatgcaacaggctttttccctacacaagtatacctcattttcttgtgatttgctttattgggcttcacagatatagcgttttatacaaattgaaggtgtgttgcaactctgcattgagcaagtctctggatgccatttttctaacagcttgttctcacttcttatcattttgtcttattttgataattattataagatat

SEQ ID NO: 872 - DNA, 476 bp, Homo sapiens
cctacaacacccccaccccatacctgcaggactcactccatcaccacatccgtctttgtaaaaatatcacttcactgaggcctttttgccctaaaaatttcatgcacacatacacacacacacacacacactctccaccaaggaagacactggggcagagtattttatagcaccagtcaccaggcatttatttaacatggcagtgtcagtgaaatagaatcccttcatttcttttttctccaacatatttataggccaaaaatgaattattatggtctgtaatgagcaatctctaattgaattaattcctcaaggagagagggaagaaaaaaagcagactaagaagtacagagaactctagacactagaaattctagggatcccagaattattattcctgatcattttaggctctaattcttccttgctgccccagatcctagaacaacatctaccccaagtattaggaacactga

SEQ ID NO: 873 - DNA, 639 bp, Homo sapiens
ttggccgagcggcctacggctgcgagaagagacagagggtggttgttacacctgggctatagcagtgtcctcagtctttctgctcacacccagaaacagaccaaataaatgtgagaatttagtatataatcaaagtggcatcctaaaaatagtaaacataagacctttttttaatgtgtgtgagatggagtttggctcttgttgcccaggctgcagtgcagtggcacaatctcagctcactgcaacctccgccctcctaggttcaagcgattctcctgtctcagcctccgaatagctgggattcaggcatgtgccaccacacccagctaatgttttgtatttttagtagagacagggtttctccatattggccaggctggtctcgaactcctgacctcaagtgatccacccaccttggccttgcaaagtgctgggattacaggcgtgagccaccgcgcccagccaaaagttttgaaaataaaaagaaaaccatagcagcatggtggtgcactgcctgtagtccccgctacttgggagtctgagacttgcttgggcccaggggttcaaggccagcctgtgcaacacagtgagactttgcctctaaaaaatacatgaataaaaaggtctttggtgtggtgc

SEQ ID NO: 874 - DNA, 177 bp, Homo sapiens
cagagagggagagagagggacaaagacagagacagaaagaaagaaagagacagacagacagacagacagacagacagagaaagagacacagagagaaagacagagacgaacagagagaaacagacagagagaaggccctagcccagtagcaatacagtgccttttctttcattttct

SEQ ID NO: 875 - DNA, 608 bp, Homo sapiens
acagaggggatttcaatgtattagattttaatacatagaaaaattattttgtgtaagtacttgcttcaaaagaattaaaaatcaacatttataacttcaggtgaatgagatattcataattttttttggcctcactactcatctcctaaactacagtcccatttttcttactcttctttgtagcaaaacccctttaaataattgttcttatttctcccctcatattttatctgaagcccattttcatcaagcatttgctccaactatacccaaagcttctcttatcagcgtcactaattaccttcatgttctcaaattcattagtaaattctcaatcttcttcctgcttgatctatgagcaacacttgacagtattggttacttcatcctccctgtatccctggtcttcgggtactgtgctgtcttgctttgcccctaatttattagtcactccttgttaatctcctttgctgttttaccctgttatacctgctttcttaatattggagtgccccggggctcaacccatgatcctctctggcttccattcctcccttgtgacctatcagctctatatcgatgattctcaactctcagtttcagtcctg

SEQ ID NO: 876 - DNA, 479 bp, Homo sapiens
acagagggtggcagggtgtaatggctcacacctgtaatcccagcactttttgaggccgaggtggagcagatcatttgaggtcaggagttccagatcagcctgaccaacatggtgaaaccccctctctaccaaaaaatacaaaaattagctgggcatagtgttgcatgcctgtaattccagctactcaggaggctgaggtgggaggattgcttgagcctggtgggcagaggttgcagtgagctgaaattgcaccagtgcactccagcctgggtgacaaagtcttaaaaaaaccaaaaaacaaacaacacacacacacacacacacacacacacacacacacacacacagagagagagagagagagagagagagagagatttatatgtcagcagattacagactaagaaaccccacactctctacccccatggagacaccaattcaacagcattacagggaccaatttctttgagagaaat

SEQ ID NO: 877 - DNA, 526 bp, Homo sapiens
  misc_feature 426: n = A,T,C or G
acagaggggagtgacagtgtttaattcattgtagtacaaattgttactattgctaatgttcttaatatagcacattaaattaaagagtcactgtagctgtacaaaatcatatagagagctcaccactttcaattaattcggggatcctcccaaggctgcataactgagctgggagagttcctcctttgtcactggagacctgggttgaaatcctggagacctgggttcaaatggcttgctgtgagaaagttacatgaccttgaacattactctgagccagttttctcttctgtaaaatgagaataatcatctaagcctgttaatgggatttaggagaaaatgtaaggtttctagcacaaatgttaacaagctcttaagaaatagtagctcaaggccgggcgcggtggctcacgcctgtaatcccancactttgggaggccgaggcgggtggatcatgaggtcaggagatcgagaccatcctggctaacaaggtgaaaccccgtctctactaaaaatacaaaaaatt

SEQ ID NO: 878 - DNA, 328 bp, Homo sapiens
tatagtgaaaccctgtctctactaaaaatacaaaaaattagccaggcgtggtggcgggcacctgtagtcccagctactcgggaagctgaggcaggaaaatgacgtgaactcaggaggcggagcttgcaatgagccgagattgcaccactgcactccagcctgggcgacacagcgagactccatctcaccaaaaaaaaaaaaaaaaaaaagggggtttcaaagttttccggaaaaatcgggggttggaatttttgggaaccagggtttaacttttaattttaaaaaactttccctttttaaaaatttattttttaaggggggggggggg

SEQ ID NO: 879 - DNA, 644 bp, Homo sapiens
  misc_feature 582: n = A,T,C or G
ggtattttaagcctttattttgaaattgtggctgatactattttattacagataatgggcttgacattctaaaagtaatggagtgagattaccttcaaacctgtatagaaagtagtaaaaccttaaactgactctgttcttactaatctagggaataataatatcagtaattagtttcttagagttagcacatgtgagagtcatctgtaatgctttctgattctcacagtaactctatagtattacatatccctattttacagacaaagatagtcaagaagattaagttctttactgtgtcaggaaaagagacctcaaacccaagttcgagaattagaactttttctgttatatgttactgactcattaaagtttaaatgtccttaaaatttcttaagaattgccctaagtagatgattctcatctcaccttctaggtacactgatttcctctataatatttagaaacaggtacattttgttttgttttaattttaaaacatccgagatgggcatggagaaggcaaaatgattatttaaaaaaattttttttgtctgcattccattttgagtctgctaattntattttcttccatgtgatgtcaaataaatattcacaggtaagttattgcaataaattattgc

SEQ ID NO: 880 - DNA, 446 bp, Homo sapiens
gaggacccagtagccacatgtggctagtggctactgtgacgggcaacacagatatggaacacttgtatcctcacagattattctagtggacagtgcagatctagagctagaggacatgggtttgagtccccactcccccactgtgtaaccttggggaaggttctggacctctcagagcctcaatttatcataaaatgaggataatcataatgccgtggtcctcactggacttgtgcaactaccactgatgtgctactaattactttcatttagtgcattcatacttccacttgggtgttttccacatattattattattttttttttttaagtaccgacagggtctcgctctgtcactagggctagtctcgacctcctagcctcgggcaatcttcctgcctcattctcccaaagtgccatgattacaggcatgagccactgcccct

SEQ ID NO: 881 - DNA, 630 bp, Homo sapiens
cgacagaagggtgtttcaagtagtgttcatgttcttttccatattagagaaaatattatttaatcattaacatttagtaatttaggtaagacataggcccagggtttcttcataaagacacgaagatttattgccttttccccacagaataatggatagttgaatgtgtgtgtgtgtgtgtgtgtgtgttggggggtatgtgtatttatatatatatagtatatggattgattattcgtagtttgaatgcttggcttcttccaatcaatgagtacaaaatcagcttgaccatttgtgtaagtgacaaattagaatttataacaaaacccatatagctcagatatttaagttactaattctagcagacaatcaggcagtcaattattctaagtagttgaattggtttagggtgttgagatataaccagaaattagtatgacaataaaggattactattcaagaagtcaagctcaagtgtggcaaaacagagcggacatggaaaatgagggggcagcaagagatcattggttttctaaaacataagaaagtcgctggaaggaaagggataaaatataatcttttctaaggtcagctctataagcaaaatttaaaagtcattcgtctttttca

SEQ ID NO: 882 - DNA, 477 bp, Homo sapiens
cgacagaagggaacccccaatcctgtataggggcacctctgcttccaggtatattagtacctaccactctattataattgcttgttttccccattaccctctaagttccgtctcaccatggtagtagttgtcataatgtcttaatccattcaggctgctataacaaaataccttagactgggcaacttataaacaacagaaatgtattcctcatagttctggaggctgggaagtccaagatcaaagcgccagcagagtcagttgctggtgagggctgcactctgcttcaaagacggtgccttctggccgcatactcatatgacagtggggatgaacaagctacctcaggcctctttcataagagcattaatcccatagatgagggctctgcctcatgacctaataagttccaaaaggctccacctcttaataatattgcattggaggctgggcgcagtggctcacacctgtaatccc

SEQ ID NO: 883 - DNA, 574 bp, Homo sapiens
ggctttttttttcatcaggcatcctggagcccatgcaccttaaactttgccagcctctgctggccctgatcccttgtctctcaggacacagctcaaataccacctcctccagctcacctcacgcccaccatttggcaagtcctaagttcttgtcctgcatccaggaagaatgaggtatgcggacaactggagggtgaacaaggtggaaaggagctttattgagtgacagaacagctcttgggagacccaaagtgggtggctcctatctgcaggcaggtcatcccagtgaatgtccagctctcagtggagaggagacccagagtgggcagctcctattcgcagagtcatgtggaagcaccaggatcccattcctagcactgaaattaaacaaatgaaaaaaaattagcatgaaattctttgtgcgtggacagtgacctgagaagacaataagacatttcaaagcattgagttaaggataatgaagtttataaaatctagtggcaagatatagctgactcttgacacagacagaggaaaggccatgtgagacacagcaagaaagtgaccatctgca

SEQ ID NO: 884 - DNA, 353 bp, Homo sapiens
gtgtttaattgagatgacccaaattctttttttttttttttgaaacggggtttcgttttgcccccaaggttaaagggcaggggcaaaatttgggttaattgaaacctccgcttccggggttaacacatttttctggcttaaccctccaaagtacccaaggccccccccaccacccggggtaaatttttggttttttaaggggaaacggaaaaaaccaaatttttaaacggcctaaaaaaaccggtaaatatttgaaaattttgcccctaggtttttttaaaagccacctttttaaaaagggttccccctatttgaaatggttttttaaaaaacttctccccaaaaaatttccc

SEQ ID NO: 885 - DNA, 521 bp, Homo sapiens
gctgcgagaagagacagagggtgcgtagataaatgctacttcctgtgcccattctcttgggagttctccccaaacttcaccctttaaaaaaaaaaaaaaaaaaaaatttaaaaatgttttttacttaacacaaaatttaaaaaaatcatgtattcgatataaaaattatggaaatatttaacattcttttttttctagtactaaatcttggaaatctaccatgtatttttatacttacagcacattttaattcaaattggccacatttaaagggctaaaggctcctatgggggaaggggctaccctattgaaacagggcaaatctataaaaaaaaaaaataaaattactttcgccatttttccttttggttaaaggttagcaataatatatacaaggctgggcacacaataggagctaaacacaggttcactgggatggttattggctatcaccattttatttttaaaggggccttttctcccattttttatcctttcccccattttttaccccttccccc

SEQ ID NO: 886 - DNA, 585 bp, Homo sapiens
acaggaagggcacttcctaactggaggactcagacaattcacttacctttgttgtgcctccatttcctgatctgttcattgtagatgataatagacatcatagataatagacatacatcagagagttgtttgtagattaagccagttaatttaagcagactgctggaacagtgtctggtttataataagtgttagctattttatagttttggtttaatttgtaacagagaaatccttggcattatcagttttggagtaagacacaaaatgaacattttaatcattatggaagtaattcatactcattgcctcatgctggaaagcaaatggaaaagagactaaacagcactcaaaacatgatgcccaaggtgactgccatttgtggttgatctatttctctttgtgaattgagatctgcataacaaaaccgtattgtaagtacaagtttgagcctaattattttcacttaacatatatgataagcatttccccataataaaacaattattcataactttaatggctgcataatgtaatcatattgattaatcgtaatgtgtgacacattttcttagtgatgaacat

SEQ ID NO: 887 - DNA, 583 bp, Homo sapiens
  misc_feature 144, 210: n = A,T,C or G
ggattattctgtctctttctaactcctatgtctccaccagactcagggtacccactgggtggtgtggggctggtttccctaacattccccaccaaataaagcagctccaaccttctagatggttgctcagctcagaagtcttanagaaattctgatgcctctcctcacatttgctctgtcggcaaatcctggtgtcacaagagggctcangagggtttctggatgccaacgagaccccagccacagccggtccccagattcttgacatcatcacaagaaagaattcacagatggtgcacaagaaggctctcgccagatgctggtcttgtgatcttggacttcccagcctccagaactgttctacttgaatcatagtttctttgctcctggaagacccctgctattcccagtgatgctgcgaactggggttcaaagtggggtggcctggtgaggcctaaaatccatgtcccgtggagaactgcctgcatcccttacagaacctgccacatatttctgcagcttccaagaggaaggctggaatttactgagcttactgaagccaattatccaaagagtatgtgat

SEQ ID NO: 888 - DNA, 391 bp, Homo sapiens
ttgtgaaacaattcacatcccaattccggtagttcagtcagaggtagttgtagttttaggtgtcttattttccttttgaagccattgtattccattggaattttaaataaaacattaataggtgattaataagttaattaatgtgccaaactgaagatgtaccaaactgaagaattgtatggttttacataatccatttttaaaaggctttattggaatataatttacataccatataattcatccatttaaagtgtctaggtcgggtgtggtggcacatgcctgtgatcctagcactttgggaggctgaggcagttggattgcttgggctcaggggtttgagaccagcctgggcaacacagcaaaatcttgtctctacaaaaaattagct

SEQ ID NO: 889 - DNA, 533 bp, Homo sapiens
ggttcctaaagcgaggaaaccaagccgggcgcctcttgcaatggagacggtcatttcttcagatagctccccagctgtggaaaatgagcatcctcaaggtaagtttactgaagaaaggaaactgggcatgaaaacaatagcctgaccctaacaatgtcttcaacaatgcttttgaatctctcccctggaaaaatcaaagcagggccagataatgtgccaaaccacaaaaatcagtgacagtagtttggcaagatcacccaggaataaatcttgggcagagtggggatgattaatatcttcaattatcaaaccacttgagagaaacatctgaggtacaggcaaaacttccataggcaactttgggctggctaccatgttttaaaagtcctgggtattttctgcatagtccagaaacagtgctaccaggattttatcacccagcaagctcactaaagccactgaatgtacaccaaaaattatgcaaagggcttggtgcagtggcttacacctgtaatcccagcactttgggaggc

SEQ ID NO: 890 - DNA, 575 bp, Homo sapiens
gtaccagctcctctttgtacctctggtagaacacagtgataaatccatctggacctgagctttttttgcgtctttctttgtcgcccaggctggagtgcagtggcgggatctcatctcactgcggcttacacctcccaggttcaagcgattcttctgcctcagcctctcaagtagccgggactacaggcatgcaccaccacacctggctaatctttgtattttcagtagagatagggtttcaccatgttggttagattggtctcaaactcctgacctcaggtgatctgcctgcctcagcctcccaaagtgctgggattacaggtgtgagccaccacgtctggccatctgagcctaagtcttaagaagacctgatcatttcaattcatgctcttaggagtctatagtcaccatttgagtcttgctggagaaagcatgtgaaaaaaccacaaggagggagcaagtggaaaggaagaggtcctgaaacaacagagaagaatcaaagaaacaagtcaatcgggagaagcacagcctgctcgttttcccagttgagccattgcagccagcctcgaactatt

SEQ ID NO: 891 - DNA, 423 bp, Homo sapiens
ggccgctggcttaggggatgccgccaagtgacctaaagagtttcagagtcttaactaaaccggaggggatagcttcagtcttgccacaacttcctaaatgggccttccagcagaaccattagactgcaagtgccaaacagacatgttgtattcaccgccttgtctccagctcccccagaaccatccatggtgcattagaaaaaaagaatatttgttgcacatataggtaaatttgggcctactctttagaaatgatttattcctcagtttcggattcctcttttttttctttcctatttcttgtcctttctcattactttttatttatttatcaatttatttatttcagggtcttgctatgttccccaggctggtctcaaactcctggcctcaggcagttgcctcgcttcagcctcccaaggt

SEQ ID NO: 892 - DNA, 586 bp, Homo sapiens
  misc_feature 488: n = A,T,C or G
gagtcaacaagtaccgtaagggaaagttgaaaagaactttgaagagagagttcaagatgagattagggtggggacacagcccaaacatgtcaggtaacttcagtggaatgatgactgcataagtcatactgtactgaatggaagaaagagttggaacagtgaacatattctactttttcaagaatttctcttttgaaggtatgggaaaaagatggcacaaaattcatttgaggatagcatagatctaaaggcatttaaaaccttgagtcttgaacatatttataggcacggaaaaaattctacagaaaggaaagattgtaattataggagagagaaaaacagtgatatttctgaggatattgtggggagtgggtgctaaaggaccattggatatatcattcttaaacagaagggaaagatgggtacgtgaaacagaggggcaaggtaattggtagttggcagaagagtggttgaatttaaggatttanggtgaagggagaaaaagccccgggagtgccaagaagattaataaatgcttttgttattcttttctgaattcttttctggtgagaaactggaagaagtc

SEQ ID NO: 893 - DNA, 325 bp, Homo sapiens
  misc_feature 253: n = A,T,C or G
atcaatttaaaaactgcaaagacaaattacatgaaagaacttatcactaaggagcattttagatattagaagtctaacagaattattgcgaggccaaggtgggcaggtcatgaggtcaagagatcgagaccatcctcccaacatggtgaaaccccatctctactaaaaatacaaaaattagctgggcatggtggtgtgcgcctgtagtcccagctactcgggaggctgaggcaggagaatcgctggaacccangaggcagaggttgcagtgagccaagattgcaccactgtactccagcctggtgacagagtgagactccgtctc

SEQ ID NO: 894 - DNA, 546 bp, Homo sapiens
gggggagaaattgactttagaaacagacccgacaggagacccaaataaatgaattttcagaaaaagatttcaaaacaactgacagaaatgacaatgacaagtgggagaattctagcagagaactgaaaaccacaacagataaacaaacagggccagacacggtggctcacgcctataatcctagcactctgggaggcggaggcaggcagaccacctgaggtcaggagttcaagaccagcctggccaacacggtgaaaccccatctccactaaaaacacaaaaattagccaggctaattttgtggtggtgagtgcctgtaatcccagctactcgggaggctgacgcaggagaattgcttgaacccgggaggtggagtttgcagtgagccgagatcatgccactgcactccagcctgggcaacagaacaagactcttgtctcaaaaaaaataaaataaaaaataacataattgaaaaatacagtaattaggaagttcaagggtgggcttgatagcagactacacacagcaaaaaaaaaaaaaaaaaac

SEQ ID NO: 895 - DNA, 536 bp, Homo sapiens
  misc_feature 105, 112: n = A,T,C or G
agggaggctaggagtttgggaccagcctgggcaacatagtgagacctcatctctaaaaatgtttaaaaagtagctgggcgtggtggtgggtgcccatagtcctanctactanggaggctgagatgggaggatcccttgagcccaagaacttgaggctgcagtgagttataattgcaaaactgcactgcagcctgagtgacagaacaagactccaactcacacacacacaacaaagtttttgctaaacagaagagagattttggggatatctggcaataaaaggagaaaatactccaggggagatggatatgggaaggacagagtgggacacctaagagaagccccacatgattttcccaatattgcctgggcagccctaggagctgagggatgggacaaggagataccagcagcctgcagaaagctgcagagctgaacttgcacacacaccatccacggacacctgaatgcagcccatgtttatgccatagcatgtgctctctcttataagcctcatgcacccgctatgttccttt

SEQ ID NO: 896 - DNA, 590 bp, Homo sapiens
gacagaagggctctgtgcagatgtggttatcattccaaataatgagctccagcaccaagactgttccatcctcaattgctttgagtgggcaacgtaggctttccacacacgagctacatgtaggttccttgggcacccagatgggagccgtgaaacacaaaccttccatggtcaggtccgtatctgtttcctgccttttccccagcaatccccaggcctcagcagcagtggtctacctctgctgattctcattcagaatctaaacttagaaacaattagaacctagaccccaattctacctgaaagtaacagaataacataatctataccctgaagcatgactgtttgcccaacgtaatgaggatgaactgagagataatgaatgaccatgaccctggcccaagtaacaagaatgaactgtgagataaatgaatgatcatgaccaaaaaaccctactacaacacaacaacaaaataaagtgattaaaaaatggacaaagaacatttatccaaagatgcaaagatgatataaaaatagccaacagatacatgagatatatgagaagatgtgtaacatcactagtcattaaa

SEQ ID NO: 897 - DNA, 601 bp, Homo sapiens
atccaccaagcgacctctccaccatcctggcttcagcctcctccaccagcagccccgccgcacctttccaccagcacccccatcacacctttccaccaccagccccaccacacctttccaccaccagcccgccacgcctttccactaccagccccgccacgcctttccaccaccagccccatcatacttttcacttgcagtttagttccttccgctcagtctgctttcatgtgcttatagccatcaactagctcagcaaatagagcacactctttcagatcccctctccatagaaaccagatgggaaattgtaaataacaattttttcttcttttggagaacaaattatttctgagaaataactaaacccaaagttgcaataggtaaactcggaagcacttttccccccaagataaagggaagcacttgatgaaggggtgagaacatgagatgagaaaggtagaaaatgatgtcagagggaaaggaaagtaggaccgggaaagtcctgaagaaataatgaagtttgacattacttttactgcaggggttcatgggtttgagcatcaactaaacttgagttcgaagcttggctctgtcatgt

SEQ ID NO: 898 - DNA, 575 bp, Homo sapiens
  misc_feature 39: n = A,T,C or G
gagaatgtagcctcagtgatgaatgctggtatggatcanaaggtatggcagctggaggatgtccaccaactacacttttgccaataggttctcttgcaggaagatttgagcagcatatgcccatggtcattagagtgtgacactggagaagttttatcatctctctgaactgcatttgcaaaatggagttaatgtcatttttgttaccaggttttgagaggactaaataagataagtaaaaagtatctggtatagtatgtggacttaatattagtagctgactgtaattctttttccgttaacacatatgagcaaactgtggctcagagacagaaaactaccttcctgaaggccacatggctagtaagtgccaggtacaagattaaaatccagcttaacccaatgtcctacatatattatattcaggcacatacttatctaaaaatctatgcccaatttttggaactagggactgcatgaacactctatattctataaagctgttcatggagaaacatctgccagccctggggtgtgcacatgtgttggttttacttaatttcctcatggctgac

SEQ ID NO: 899 - DNA, 634 bp, Homo sapiens
acaggaaggaaataccctctggctggtctagtctcacaatagaggtgagcacagggactttggtgactaaaatgcaaggcagttcctttctctcgttttctccatcctaaagcactgcttcttcattagctcctccaccctcagcaaaggaatacagccaggatttcttggagacaaaaaaggtagatcatgtagccaagatgacatggcctcatagcatatatatgacatcatgtgacatgtatcagtgggtctatgaggaacactaacagtacctgttatcagcccctccgtcctcaatcttgaaacaattcgaagtcgtcactgatagaaaaccgtattggctgagtgcagtgatttaaacccataatcccaacactttgggaggctgagagaagatagcttgaggccaggagtttgagaccagcctgggcaacatagtgagattcccccatctctattttttaaaaataataaataaatgattaaaaaaaaaaaagaataaccccaactatggccaggagtttttctcatcctataccaactgaaaaaaaaatgtttgaggctgggcgtgatggctcacacctgtaatgctagcatttttggaggccgaggcaggcggatcataaagtca

SEQ ID NO: 900 - DNA, 403 bp, Homo sapiens
gggcctgaacctgggaggcggaggttgcagtgagacaagattgcaccactatgctccagcctgggcaacagcaagactccgtttcaaaaaaaaaaagcccgggcatgggggcaggcgcctgtaatcccagctactcaggaggctaaggcaggaaaatcacttgaaccggccagcaaaggttgcagggagccgaaatcgcaccactgcactccagcctgggtgacaaaccaagactgtttccaaaaaaaaaggggaattaaaatctcaagggggatactaataaccgttctaacactcacagctaaaaagtcacatacctactgggattttctgttacagccctaaaccatgtatcacctattggctccaaaaaatatggtcaccataactttcctggctccaa

SEQ ID NO: 901 - DNA, 587 bp, Homo sapiens
acagaaggtgtcgcccaggctggagtgcagtggcacgatctcggctcactgcaagctccacctcccgggttcacgccaccctcctgcctcagcctcctgagtagctggcactataggcacccgccaccacgcctggctaattttttgtatttttagtagagacggggtttcaccgtgttagccaggatggtctcgatctcctgaccttgtgatccgcccacctcggccccccaaagtactgggattacaggcatgagccactgcgcctggcacccatgtgtattttacactcacagtacattccagttcctcctggccacatttcaagcacagcacaggtggctcttggctatgggacagtgtgggaacacactgacctaccagctcacaggtagcacagacgcacacagcaagtgacatctcctggtcatctctacagtctggatagagccatttggaactcctgggacaaatgaccaggattcctcaacaaattaagtgttaaggaaaaggaggctaaggcaggagaattgcttcagcccaggagttcaaggctgcagtgagctatgattgcaccactgcactct

SEQ ID NO: 902 - DNA, 348 bp, Homo sapiens
  misc_feature 218: n = A,T,C or G
cagaaggggtctcactctgtcatgcaggcttgagtgcagtggtgtgatctcagcttactgcaacctccgcctcccgggttcaagtgattctcctgcctcagcctccctagtagctgggattacaagtgcccaccaccacacccagctaatttttgtattttcagtaggggggggatttcaccatgttggccaggctggtcttgaactcctaacttcangcaatcccccacctcggcctgccaaagtgctggattacaggcatgagccaccacgcctggctgaaagcttgagttcttaaccaatgggtaatattgcctctccttaaatctttgattatactaagctttt

SEQ ID NO: 903 - DNA, 554 bp, Homo sapiens
caccttatctaccataaatcccactttaatacatgaacaaatccctcagaataagaaggtcatttctgtgctggagtttcgaatcaagctcaagaagttcccatatctgaacctgtccaattgactttagggtcatttaaaaaaaaacatatattttaccatgtgataatgctccagaaaacttgctagggcaagacttaatttcaaagccaaaagagcatataaaattctcctctggctgggtatggtggctgatgcctgtaatcccagcacttcaggagggtgaagtggaaggattactcgagctcaggacttcaagatcagcctgggcaatattgcaagaccttgtctcaattaaaaaaaaaaattctcggccaggtgcagtggctcacacctgtaatcccagcactttgggaggccaaggtgggaggatcacctgtggttgggagttcaagaccagcctgatcaacatggagaaatcccatctctactaaaaatacaaaattagcctggcatggtggtgcatgtgtaatcccagctacttgggaggctga

SEQ ID NO: 904 - DNA, 384 bp, Homo sapiens
gagctactggggaggctgaggcaggagaatggcgtgaacccgggaagcggagcttgcagtgagccgagattgcgccactgcagtccgcagtctggcctgggcgacaaagcgagactccgtctcaaaaaaaaaaaaaaaaaaaaagggatgggaaaccaaaaaaataccgtggccaaaaccccaaaaaaaaaaattgaaacccttttatgaaaaaaagggggaaacctaacttaattgggaccaatattccctttccttgaaaggggggaaattcctacattaaaaaaaaaaatttttgggttaattaaaagggcaaaattaaacttttgctgttaacggaaatccctttaaaaggaaaaaccggggatttttggaaggggaaaa

SEQ ID NO: 905 - DNA, 474 bp, Homo sapiens
gatcggatcatttgactttacacatttttatgccattcaccatagccctatggcccactagtttttaaatacagtgtttcctagctatatgattctctaattagtgaatttctggtcagtgttacagactgaagactgatttagaaagaaaaatggggccgggcgcagtggctcatgcctgtaatccagcactttgggaggccaaggtgggtggatcacctgagatcaggagttcgagaccagcctggccaacatggtgaaaccccatctctactaaaatacaaaaattagccaggcatggtggcacgcacctgtaatcccagctacttgggaggctgaggcaggagaatcgcttgaacccgggaggcagaggttgcagtgagccgagatggtgccactgcactccggcctgaatgacagataagactttctaaaaaaaaaaaggtatttggggcctgggccaccatcatataa

SEQ ID NO: 906 - DNA, 454 bp, Homo sapiens
  misc_feature 216: n = A,T,C or G
ggaagtgccctcactaacagcttttggtgagcacttactctgtgccattagtgctaagtgcctatataccttataatatggtaatagtatctgctatccagagaaatggtggtgttccaatgagataaaggcacacaaattgtctggctcagaaagtggtcaatacatgatcatcaacattccgttgtgtattaaacaggactgtccctcacctancagcaactgtggccaaatgcttggtatcagtcctgggagatgggttctgttgttgtccccatcttaataaggaggaatttgggaccgaagaggttaagcctcttacccaatgtcacgcagctggtaaacaatagaactaaacccaagtctggctgcaaccagagccgtagtgcgtggttgcatgttatcagcctctcttggtcaaaggattcagaaggcaaaggactccagacgtttg

SEQ ID NO: 907 - DNA, 621 bp, Homo sapiens
  misc_feature 328: n = A,T,C or G
ggagtttcttttggattctttggactgctcccttaccacttacagagcctggtgtgagagggagcttgcctacgcctgtgtgagggaaacggatttctaagctcctgttgttgatgtgtgctgccaaatggtgcagatctgcaggagacggcactttattatttgttagcgagttgtggttattcaaagatagacccagatcttagttagtggagggaatgaagactgaagctgctctacacgagtacttagcaggaattggagttggcaagtggaaagaagacaggcatgtgttgacgggcttccagcctccactgctgatacctangcaaacaaggtctggagtggacctccagcaaactccaacagacctgcagctgaaagtcctgactgttagaaggaaaactaacaaacagaaaggacacccacaccaaaaccccatctgtgcatcaccatcatcaaagaccaaaggtagataaaaccacaaagactgggaaaaaaacagagcagaaaaactggaaactctaaaaatcagagtgcccctcctcctccaaaggaacgtagctcctcaccagcaacggaacaaagctggatggagaattactttgacgagttgacaga

SEQ ID NO: 908 - DNA, 570 bp, Homo sapiens
gactctaaaacacttttaataaatctcttagattaaaaacttttaaatcttgagcatactttaatcccttctccatgactcggattgtattatggaacatcatttatctatcatacgtgatgttaattcttgactataaatcgctcaaagtaggagccatgtcttaatcacatttgatttcccacaggatctagcacagtatattgcaaatagcaagccttacttaataaatgctgaactaggctactgctcttgctaaatagccacagtttgttttacgttatgaattatgttgcatctctcccttcccttattatcacgctggctgctggtataacttttatgaatcataaaaaattaaataaccaggctttttaaaaaaatagatctaagttggcgggtacggtggctcaagcctgtaatccgagcactttgggaggccgaggcgggtgaatcacgaggtcaggagattgagaccatcctggctacacggtgaaaccctgtctctactaaaaatacaaaaaattagccgggtgtggtggcgggcgcctgtagtctcagctactcggg

SEQ ID NO: 909 - DNA, 455 bp, Homo sapiens
ttctggccagaaaaagcgacaccccaaggatcctgtaacaatgttttacttacttcagactcagctttacctaactaccttgatgcttttaacggctttcttctacttggccgtgtggtcacagatgtcttgtaaaaggcctcgttagctgctcacatgtcagtgcctctgttatgctctccagctgctatctcccctacatctggttcaagcgctcttgctgtagtataggaggaggaggagcaataatgatagtaatagtaataacaggctgggtgcggtggctctcggctgtaattccagcactttgggaggctgaggatccactttggatcacctgaggtcaggagtttgagaccggcctgaccaacatggcaaaaccatgtctctactaaaaatacaaaaattagctagctgggcacggtggtgcgtgcctgtgatcccagctatttggg

SEQ ID NO: 910 - DNA, 385 bp, Homo sapiens
acagaagggcggctaatttttgtattgttattagagactggcttttgccatgttggccaggctggtctcaaactcctgacctcatgtgatctgcctgccttgacctctttccaaagtgctaggattacaggcgtgagccgccatgcccatccataagcaggcattttctatactaatacataaatctttttgtactagaggacaagggcaaacttttctcaagataaactataaatactctttaataaaattataattctcttaaccaagtaactaccttctaccatctttccaggatcaactaaatctgctaagatactatctttcctttaaaaagaattttactggctcggcgaggtggctcacgcctattatcccaacactt

SEQ ID NO: 911 - DNA, 705 bp, Homo sapiens
gtttccatataggaatatactcttgaaaccgggataactgtacctcatggaccaattaagagaatttcaagggcaatttaaactctctgagaattgtaagaagcagaacaactattgaaccacttcgtcctggaaatcaactaaagatgaaatcttttatcccaagtaaccattctccgcaactctagcgttaacatatgacaaaacgatgtggtactgatggagtactgaagtttatgaatgacttgctttttaattttgtatttaaaaagcattcagcgttagtccttataaagtggaatgcgtaattttggcatctggggatgctttgctgagtgggagcgagggaatttcaaccaagtatccagacatggaatttttagcttagctgttcgatgctgtggccttttccagtgggttgtggctcttaaactattgttgtgtttttgattttacagctaattttcttcttaatgttaaccatggatacatttttctaaagggaggaaaacaggagtagagaaagaaaacatctagatcatgtatgataaagaatgatactgtagctatttttgttcttaacaacacaatagcaatgctccaaataaggcaaagagatgtgagaagcatttataaataataatttaaaatattatgcaaatatataaaccatgtgtttataatgtttcaaacatgctttaaatt

SEQ ID NO: 912 - DNA, 450 bp, Homo sapiens
  misc_feature 323: n = A,T,C or G
aggagtgtgacttcacggtgtggagcacttacaatctggggttgagccctggtaggatgtctagtatcaggcaggacaatgaaataggatttggtgataactcattagtcactgattgatttctcacaccaaaatagatgcacacaaaaaaacccaccatggatgataccatccattatatttacaaatagaagtttaaagaccaaatgttttccatactaagaaaggttggtagaaaagcttcatagaggatgtaacatttgtgctgggtcataaagaacaagtagcaggctgggtgcggtggctcacacctgtaatcccancactttgagaggctgatgtgggtagatcacttgaggtcatgaattcgagaccagactggccaacatggcgaaaccttgtctctactaaaaatacaaaaattagctgggagtggtggtgcgtgcctgt

SEQ ID NO: 913 - DNA, 648 bp, Homo sapiens
ttccacagcctatacaaccagtagtcaaggtaggctccctaactgtcttttgctcccattaatcatcaattgtgtcaacggataataggtaaatttaaaattatttgggtgcctactatagtcatgccttggtatttgtggagaattggttccaggatgactgctggatatctaaatacctgtatactcaagccccttacataacatgatgtagtatttgctatcatatggaatataaagccgccaaaagacaacggggacctctttaagatttttaatgttcataatatattgataaggatgccttacagtgcagacaaatatattgtaatgtacaactagatagctggactatccatcatgaagttttggaattatacacagatcaatactgcctctagatgtgcttaattcagattggaactattttgtgtgtatgactgcctatgcttgttttattttttcaaattataagtaacgctggagagatgaaccagctgggtttggccaagtgcattggttctggcctgaaataccaacactttgtgaggccgatgcatgtggatcacttgaggtcgggagttcgagaccagcctggccaatatagtgaaaccccgtctctactaaaactacaaaaacgaactgggc

SEQ ID NO: 914 - DNA, 399 bp, Homo sapiens
gggggcttcatgtaatcagctcaaggtttgaatacaacaaaaagacttacactctcgcaagtgaaaggcaattctttctgcctggtagccttcaaactgagacacaggcttttatcctgccttcagattcgcctgggaacactggctcttcctgagtctcaagcctgctggccttgagacaagaactacatcagctctctcagttctcaagcctttggacttactctggaactaagccatcagctctcttgggtcgtcagcttgccaaccaactcatcctgaagatcttgggacttgccagccttcatagtcacgtgggccaattccttttttttttttttttttaaaagggggttttactttgttccccaggttgaactgaaagggcccaattttggt

SEQ ID NO: 915 - DNA, 489 bp, Homo sapiens
ggtcattactcagttgtgagggggaaggtagactctttccagacctttgataaaggggctgctcaaaaaagccccgaccttgggcctctgctaaaaccatggctttaagtaaggagggagcagatatataaaaatccttatccctctttctaatctcttatgtcctgtgagtgtcacccattgagtaaacccaagtggaagtcagcaggaaagtagctgggatgatgcagtctttacaggctatgatgtaaggaagcatgagattaatgagggcagaggggtgaaactgcttccagcttgacttccatccaatggttgaggcatcttggagattgtcagtgacctacagaactttcctatatatacaataagaggagttaattcaagaccagtgcataagccaatcatcaacctcctattgaggaggaagaaatgagaggcctgagaaggaaagtgcatcaaactccccttactaacatcatacctgtc

SEQ ID NO: 916 - DNA, 562 bp, Homo sapiens
  misc_feature 292: n = A,T,C or G
gtctatatttacttggaggacaaagaagtcatttaaaaaaataggcaacatcctggtgcagaatttaaatgtatacttacattacttgaagatttcctcatcaagaaacaaatttccatttctaatcgcccttttcttgtgtcctctgtacagattgcaattaagaagaatatctacagaaaacttaaaattgtcataagtggcacatgtatttttgatgcattcaaaatagagatagtccaggtgcagtggcttacacctgtaatcccagcattttgggaggccgactcangaggattgcttgaggccaggaattggaggctgcagtgagctatgatcacaccactgaaccccagcccgggcaacagtgcaagaccttgtcttcaaaaaaggaaagaaaaacaggccgggcgtggtggctcacgcctgtaatcctagcactttgggcgagcggatcacttgaggtcaggagtttgagaccagccaggccaacatggcgaaaccccatctctactaaaaatacagaagttagcctgttatggtggcacatgcctgtaatccc

SEQ ID NO: 917 - DNA, 351 bp, Homo sapiens
gagtgcttgtggtcccagctactcaggaggctgagatgggggcattgcttaagcctgggaggtggagaatgcagtgagccaagattgtgccgctacgctccagagtgacagcctgtctccaaatatatatgtgtgtgtgtgtgtgtgcgagaaaaaaattttctttgggattgggggcggggccccctaaaaaaaaaaaacttttttttaaaaaacaaacccgggggggatacctttgggggagtttttttttattccctgggggtttttttggggggggcccccccccttttttggaaaaaagggggggggcccccccaatttaatttggggcctggggttttttttttt

SEQ ID NO: 918 - DNA, 460 bp, Homo sapiens
aagaaaatctagaaaaattagcaatgagatagaaatggatcccattttataaagaaagcatgatcaatgtaactactctggacaagaggcttttaagcattttttgacgagttcattgtaagaaagccattttacatagcagtgtgtgttccaaaaacaaaagtttcatgaaacaacacctacccttaatatgagggaagcattttgatatttttctattgcatgctaaaaaagctttttaaactatgcaacagaagacttgtagaaaaatgttcatcacgaggctgggcacagtgtctcacgcctgtaatcccagcactttgggaagacaaggtgggtggatcaactgaggtcaggagtacaagaccagactggccaacatggtgaaaccccgtctctactaaaaatacaaaacttagccagacatggtggcacacacctgtaatcccagctacttggg

SEQ ID NO: 919 - DNA, 502 bp, Homo sapiens
ggccgggcgcagtgactcacgcctataatcccagcacttagggaggccgagtcaggtgggtcacttgaggccggaaattcaagactagcctggccaacatggtgaaactctgtctctaaaaatacaaaaattagctgggcgtagtagcccgtgcctgtagtcccagctacttggatgactgaggcacaagaattgcttgaagccaggaggcagagcttgcagtgagcagacattgtgccactgtactccagcctgggcaacacagcgagactctgtctaaaaaaaaaaaaaagggcttcaaaagcaaccgtataacagaaacatactgaacataggatttctgccattcttgtctgcctataaggataaacaaactatctcaaataagtaactgaaatatttattcaacggtattctcatccggcataaaatacttttttcaatgtagtaacaaacttaccatcttttactttaagggttcggttattttggattggcaatc

SEQ ID NO: 920 - DNA, 596 bp, Homo sapiens
gggggcagcactagcactctggagaaggtctgccgctgtctgcactttcctggtgagaatccccaatgacagtcccacttttcagtggaggagaacaaaatatctgtctactctcttgaagaaggacacggctttgatcatatttgttcaggcttgacttggccggaggttttaggttcttagtctcaagtcagcagtctctctctctctctctctctctctgaaacacacacacacggagacgcacacacacacaagcacacacatacacaagcgcaaatcctctctttctctttctctcatttcccgtcataggttctatgcacgcagatgagtgtcacagctgtaactgaggcacagagcagtacacacagtggagccgatttccgcgatggcgagagggggcaccggatgtgacaacaataacaagactgtccttcggacaagttttaggtaagaaaatatttatgccctgattcttgtatttctgcactgtgtgtctgcaacattgagatagaaagcaactctggatagggaaatatctttgtgagggtatcatctgtgctgtcacttgcctgcaaacctgtgttctccgg

SEQ ID NO: 921 - DNA, 472 bp, Homo sapiens
  misc_feature 122, 285: n = A,T,C or G
ggacatgtaatgattatgtatatgggtaatacagttacgttttgatacatgtatacagtgtaatgatcaaatcgggtaattagcttattcgtgttaaatgtttctttgtgttggcaacgtancagttatatcaaactttacacttaactttggaattaataaataatgagttatttgaaatagcctcgtggagaagtagttgtaacagtaagttttactatttggctgtcctgaggaaaactatttcatctcagaagtcttagtgatttgaattgttactcctangttcttcaatgaagtttccatggattattttactcttaaaaataagaattgtaggccaggcccggtggctcacgcgggtaatcccagcactttgggagactgaggtgggtggattcacaaggtcaagagatcgagaccagcctggctaacatggtgaaaccctgcctctactaaaactacaaaaatt

SEQ ID NO: 922 - DNA, 553 bp, Homo sapiens
gctgactgatgcatttacaaacctttagctagacacagagggctggttggtgcatttacaatcttttagctagacacaaaagttctccaagtccccacccgattagctagacacagagtgctgactggtgcatttacaatcctttagctagacagaaaaattctccaagtccccacctgacccagaagcccagctagcttcacctctcaatgtctaatatctatattcttcttctgtgctgctctacttatcctataaaaatgtctcatcttcctagctatattggaagctctttctttgaggtcagaggctgagatgtacatgtctcactattgcccttacattggttaaggtacttttatttgcaaataacaaaaacaccaactaagactgattcagataatcaagagattttatagatgtttgcactaaaaggtccaaaggtagatctagcctaaggtaaggattgattcatgacttcatatcaccaaggaccttgtttcctttctccccctatttctgccttcctccgaaagatggcttttggagtggt

SEQ ID NO: 923 - DNA, 473 bp, Homo sapiens
tgcttgttgttttggccgaacggcctacggctgcgagaagagacagaggggcgccacagtcacttttccagatctaggagcatcatggacacctcgtcagagatgctggtacggtttggacggcgctgtggacgggcgaaggaaagtacagtcttaagtatgtctttatcagcagtgtgaaaacggactaatacagtaaattggtaccagcagagtggggcattgctgaaaagataactgaaaatgtggaagtgactttggcactgggtaacaggcagagattggaacagtttgaagagctcagaagaagacaggaaaatgtgggaaagtttggaacttcctagagacttgttgaatgcctttgaccaaaatgctgatagcgacatggacaataaaatgcaggctgagatggtctcagatggagatgaggaactttctggaaactggagtaaaggtgattcttgctatgtttt

SEQ ID NO: 924 - DNA, 556 bp, Homo sapiens
cagaagggatcctgtcctgtcatttcttcaattaattcaaaatagtacagatcctgaagttgtcatctgttattttagtgaattaaaatattaaggaaaaacacctctaattctgtcccctaaccttagagaaatagctggactagaaatattttatgagtgatgtgctatttggtgtatttcggaaatacttggcaaagaaagaactaacatcacattttatggaaaggaagaacagagctttgaacaattataacctgaaatctacttcatttccgagcttatatcctttgcatatatgtattctctcactgtatacatgtataccacccatagcctgctttctatggaattctgcagcatttaagctggaaacagtttattccagattagcccaaatcccattattaagaattttcaggctgggcatggtggttcatgcctgtactttgggaggtcacaaggtcaggagtttgagaccagcctggccaacatggtgaaacctcagctctactaaaagtacaaaaattagccgggtgtggtggtgcgtgcctgt

SEQ ID NO: 925 - DNA, 564 bp, Homo sapiens
  misc_feature 412, 444: n = A,T,C or G
cgacagaagggaacttactattttggtgtcaattttccttgtatgtgttttatttccttgcgagcaaatgttattagttaatagtagcagatacagcaatcataaaatctcagaggtaatgttctggcataggcagtaattcaaattagaactatttatggacaattcagaaagcttacttactttagttaattcttttcttattctgtattcatcttgttgcaccagatttttagcttcttttgtctacaacataagatctcagtatttttaggatgtaaaataaatgctctctttaacaatttttgtaacttggaacttaaacgtagcctattctagttatttaataaatagctaaaagtagatgaaggaaacagtttaggtggggcatgcctgtaaacccagcacttangaggcagagtcaggaggattgcttgagcccangagtttgaaaccagcctacgtaacacagggaaacccccatctctacaaaaaataaaaaatatatatatattagccaggcgtggtggtgcacgcttgtggtcccagctattcacagggctg

SEQ ID NO: 926 - DNA, 439 bp, Homo sapiens
gaatcaaagaaacaagtcaatcgggagaagcacagcctgctcgttttcccagttgagccattgcagccagcctcgaactattccagaaattctagcagaggtaccaggcatgtgagtgagtgaaggagctttcttggaccttctagccctagcagacacaacgcagagcagaaacaagccatctccactgttctgtttgaatccctgactcacagaattgcatacaagtaaaatggtcgttatattaagccacttagttttaagattgtttattatgcagcagcaggtacgtgaaacaccaaggaaatttttaacaatgttcaagaaaagctgatatttccttttgtttctcttccctataatgtttggctctatgcaagtggaaaaaagagtgtgctttcgtgttctgtccattctaccagaactttagctgaagtca

SEQ ID NO: 927 - DNA, 475 bp, Homo sapiens
ccctggcacatcatcacactgggtagtacagtgaacgatttaacaaacccaggtcaatgagctgtcataaatcctttttttgtgtaaggcatgtataaatctaaataaaggaaattaacaacaggtgataatacagatatcttgaaacaagaattctgataacatggtagtggtgagaatacacattcaaagtaaccacatggcttatggctaagttaaaaagcaagcaaagaaaggagagaaagatgctgtatggtatgtgtagttataaacttatgaatatgaatacataatcccagtcaacaaagtacctacagtttaggagggagaggcacagaaacaaactggtaagttcaatataacagggtaggcaataagacaaaggtatgtaatagcatgtcatgggatgcatacgtatgcatgcagacacacagacacagacacacacacacacacacacacacacacacacaca

SEQ ID NO: 928 - DNA, 498 bp, Homo sapiens
ctcccaagtagctgggattacaggcatgcaccaccatgcctggctaattttgtatttttagtagagacagggtttttccacgttggtcaggctggtctcgaactcccaacctcagctgttctgtccacctaggcctcccaaagtgctgggatgacaggcatggaccaccatgccaggctagcctcatgtatttctttacagtaagaacagcctaatacatttatagaggtatgacaaaaacctaatagctttatatcagttttgtgggttgcggcttatttttttgtcccttccttttatatttctggactatgtaaatgtatttttatctgcagacacattaagtaagaaatacattggctgggcgcggtggctcatgcctgtaatctcagcactttgggaggccaaggcgggtggatcacaaggtcaggagatcgagaccatcctgggtaacatggggaaacactgtctctactaaaaatacaaaaaaaaaaaaaa

SEQ ID NO: 929 - DNA, 589 bp, Homo sapiens
acagaagggaatcaacaacagggaaatcaacatttgtataatactgttaactagtaatatactaggatactttccctttcagtatcaataaatatagtatcagtctggcacagtggcttatgcctgtaatcccagcactctgggtggctgaggcaggaggattacttgggcccaggagctcgacaccagcctggatgatatggtgaaacctcatctctactaaaaatatggaaaaattagccaggtgtagtggtgcacacctgtagttacagctactggggaggcttaagtgggaaagaaagttgaggctgcagtgagccatgattgtaccacagcacttctgcctgggtgaccagagtcagaccttgtctcaaaaaaaatttttttcttaaataaataaatatagcatcaatacagcattataatatgattaatactatatcaataaaatagatacttagtcctaatgccaatgtcttatttaatagaaaagcactcgaggcattgtcattaaaaccaggaaaaagataaggatgtccactatctctgcaactattcatcttatactagaattatcggctaacgcact

SEQ ID NO: 930 - DNA, 173 bp, Homo sapiens
cagaagggtccgtttgtttttagcgccacactacaacctcccaagcagagattattctaaaaaaatgattgtgcatatacttgcaaactcataggaataaaatgattttggtctcaagcaatgaccaaagaagtgatttttttttttttctttttttttttttttgaaaaaaa

SEQ ID NO: 931 - DNA, 533 bp, Homo sapiens
  misc_feature 149, 271, 276, 463: n = A,T,C or G
ttggccgagcggcctacggctgcgagaagagacagagggggcgcggggcctcggtgtttaaaggctttgggtccgccggggctgcagcggcggcggctccgaagcgcttgttcttttttgtgaaaggcgattcctccaccacctcttangatcttgggcaagtcactcagcctcgctgagcctgtttgcatcagtagggttttgtgaggctccagcccttcaaccgaacatttgctgagcatctactgtgtgcccagcagggccttcttanatcangtataaggcaggagggaagcgtcgggagtcccaggcccgctgcctctgtaaccatgggcaggtggttcaacattacctccccttcttccccactgctctgccccatcctggcttttattgtatctcctctaaagggtgtgagctccacggggaggtacccatgtgctttgaggaaggtctgccccantttatattcaataggtactttttgaataattattgcaaagactagttctcagcacagagcttaacacata

SEQ ID NO: 932 - DNA, 576 bp, Homo sapiens
gtaccagctcctctttgtacctctggtagaacacagtgataaatccatctggacctgagctttttttgcgtctttctttgtcgcccaggctggagtgcagtggcgggatctcatctcactgcggcttacacctcccaggttcaagcgattcttctgcctcagcctctcaagtagccgggactacaggcatgcaccaccacacctggctaatctttgtattttcagtagagatagggtttcaccatgttggttagattggtctcaaactcctgacctcaggtgatctgcctgcctcagcctcccaaagtgctgggattacaggtgtgagccaccacgtctggccatctgagcctaagtcttaagaagacctgatcatttcaattcatgctcttaggagtctatagtcaccatttgagtcttgctggagaaagcatgtgaaaaaaccacaaggagggagcaagtggaaaggaagaagtcctgaaacaacagagaagaatcaaagaaacaagtcaatcgggagaagcacagccggctcgttttcccagttgagccattgcagccagcctcgaactattc

SEQ ID NO: 933 - DNA, 643 bp, Homo sapiens
gagatctggctatagatatacaatggtaattcattcccatacagatgccaaataaagtcatgatagtatataaaccggtaaaaggataatttgcagatggaacagaaagctaggcgaaaattctcctaaatttgcaagataaaaaaactgcagaggaagaagaatctgcgaaggttgatgggatgttacagaagccaaaggaaatgagtgtataaagtgaatagaggaggagggagtggggcatgagcagtgccaaatgctacagagaggtcaggtatgggaaatcctaaaacatccatttgatttaacagtcaagaggttattagtactcttttatttttggtctacatttaaggggtacaagtgccattttgttatgtggatatattgcgtggtggtgaagtctgggcttttaatgtatccatcacttggataatggacattatattcattaagtaatttctcatcatctaccccaatcccagcgcgcacttttccaagtctccagtgtatattagtccatactctatgtctatatgttacaccaaaaacatacctgcactcatatgtttatcgcagcattattcacaagagcaaaaatacggaattaacctaagtgtccagcaacgaattactggataaa

SEQ ID NO: 934 - DNA, 557 bp, Homo sapiens
  misc_feature 458: n = A,T,C or G
acagagggtcctttcttcttagctacctttctcctttccttcccttccttcctttgattttttttttgtctgtcttttactatcagttaagctacagcagaagaaatattttagaaaatctaaccctttaaattctacttgaaaattgtatttttaatgacaatgctaaaactctgaagggatttaaagatcatatttatatttttggtttttaaaggtaagaataaagtatttagttcttttatatcttactattcaaaaataaagtttttgagcctaagtattattaaaatattgggatctcatatttaatgtatattttataaatcaaaagtgtagtctaaaatttggcttcttttcttgttttgggcatccatattctaaagaaagtttttagtgaatagtcttccagcaaaaatttctgggtcaggcgcagtggctcatgcctgtaatcccancactttgggaggccgaggcgggcggatcacgacgtcaagagatcgagaccatcctggttaacacggtgaaaccccgtctctactaaaaatacgaaaaaa

SEQ ID NO: 935 - DNA, 505 bp, Homo sapiens
gtataagtaaaatgcgtaactcagtgcctaggatcgttgctgaataacgctacctattattattggaaagcattttgggacatttggacttttaagtttactgatacgttttttcagaaaagcagaaaaatcaacaacatggtttcaaatacttggatgaggctccattcactcccttagcccatcttacatatattactgcattgactggaaatgggaggcacttcacaattaggaatattgtcaggtcagccaggcgccgtgggcatgcttatagtccaagctactcacaaggctgaggcaggaggatcgcttgagcctgggagtttgaggctgcagtgagctccagcctgggtgaaagagaagaccctatctcaaaagataaaaaatcttaaaaacctgtcaagttagatgttaaagaggacatgtaaaataaaatctccctaacatgtttatgaaatagctgcaaaaggctgagcgtggtggctcacgtctgaaatcccag

SEQ ID NO: 936 - DNA, 570 bp, Homo sapiens
ggggtttaacaaataaatccttttcaaattaataatgataataattataatcttttttttcatccttgaaatcccaagtggtaaatgctccaacaaaatattatatatagaaaacagggttattataaacagattatcttgaaggactatcaaaaaacattaccataattacatacttaagaacataattataaaatctatttgaaataattcatatattgataatacagctagaaaatagaaatatttggactgccctttctgtgataaagaaatgtcatgatcccttccttataccttacacaaaaattaattcaagatggattaaagacttaaatgttagacctgaaaccataaaaaccctagaagaaaatctaggcaataccattcaggacatgggcatgagcaaggacttcatatctaaaacaccaaaatcaatggcaacaaaagccaaaattgacaaatggaatctaattaaactaaagagcttctgcacagcaaaagaaactaccatcagagtgaacaggcaacctacagaatgggagaaaatttctgcaatctactcatctg

SEQ ID NO: 937 - DNA, 471 bp, Homo sapiens
  misc_feature 96: n = A,T,C or G
cagaggggtagcatgcctggctactattttttgtatttttgctagcgacagggtttcgccatgttgcccagggtggtctcgaacttctgagctcanatgatccgcctgcctcagcctcccaaagtgttgggattataggtgtgagctaccaggcctggcctctggcctcaattttctgagtagaaacttgagagtgaaaggggtgggaattttacaggtattgaatgattaagaaaacacacttcataaggcagtcatcactccattttattttaaacatctcatattgaaacgtgcttttttattggagacagagtctcactctatcgccaggccggagtgcagtggtgcaacctcggctcactgcaacctccgcctcctgggttccagtgattcttctgcctcagcctcccaagtagctgggagtccagggcgtgcgccaccatgcccagctaatttttgtatttttag

SEQ ID NO: 938 - DNA, 548 bp, Homo sapiens
acagaggggccctttcctccttccaccatgtgagaatgcagcaagaaggtgccctgtatgaagcagagggccctcaccaggcaccgaatccggtggcaccttgatgttgaacttctcggccttcaaaactgaagttttgtggccatggggatgctgacaaagattgcttgggatgcacacaaggcagcggcgaagcctgaggggtgctgccaggccgggctctccactggccacgagtcactcacagatcctacaccatgcaattgtatcattgcctcatggaaaagaagacgctcttcaactttaacatgtttttgacacctgctaaacacctggtaatgctagctttctactcaagtctcttctcagctctcttctcagctctacagattataaatctttaatgctgacaaaggagttatcctgctgctgccagaaagaagctacacaaattttgcgatgctgtgaggcaaggcacaaatctcagaactgtggaaaacagagaatctttcccttcttcagttgtgtcttcttgccacaacttccat

SEQ ID NO: 939 - DNA, 558 bp, Homo sapiens
  misc_feature 419: n = A,T,C or G
acagaggggctttttcctccttccaccatgtgagaatgcagcaagaaggtgccctgtatgaagcagagggccctcaccaggcaccgaatccggtggcaccttgatgttgaacttctcggccttcagaactgtgacacagagaatgagtggaatactaatacattgaagggcaaaatcaaaaccccagaagatctctaaaagtctgaatgaatcagcccatattacaagataaagtccataatggtaaacggaaggctctggtcttggtttacaaaatccaaccactcaaatatgtagttgctggaagttttgtggccatggggatgctgacaaagattgcttgggatgcacacaaggcagcggcgaagcctgaggggtgctgccaggccgggctctccactggccacggatctacgcanccctggagtctggcccctggttgtatctctggaagctggtcctggccttggagttgacctgaaactctttcccgcctcatcttttctcgcctggctcctcattatgcagagctttgttcaaatacaaagctctccttcc

SEQ ID NO: 940 - DNA, 366 bp, Homo sapiens
ggggaaagaaatttgttagtcttggtttttggtgtgtgtgtgtgtgtgtgtgtgtgtgtgtgtgtgtgtgtgtgtgtgtgtgtgtatgtgtgtggcacattcactccttgttatatacgccaataagggagagatatatgagaaattataagaattatatatatatattataatttgagaaagactctctctctgtcgcccactctagagtgcagaggcatgatcttgtcttactgcaacctctgccacctgggtacaagcgattctcctgtctttcttaccctcctaaatatctgacactacaggcgccctctatcacccccatcttatttatatatttataatacacacggggtttcaccatgt

SEQ ID NO: 941 - DNA, 703 bp, Homo sapiens
  misc_feature 547: n = A,T,C or G
acagaagggatattctcacccagttaatcatgcaacaggaaggatttcattatgtggtattttgcaacaagaacctaggcaatctcattttgctaaaaggatatgacagtattccttgtcttttgtgatgctgtacgtaagaatttacttgctataaaggtttacttcttgaagttcctattaaaatttctaaaaaacaattgaagcgttcattggaccaagacagtaaaaggcagtaagttttcctgtttattcagacttaagcattatactattatcagagaagtaaactgtgcttcagagatagctcaaaaaggggcagtatcaaacactgtacaagatatcaaaactaaactttaaaaatatacatatttatagaaacaagttcatgaatctttttaaaaacctgacaaaattcagtcttttgtatttttctctggctcacctcatttcacctccaaccttagctttatgatcattcaggctttcttcactcctctgcttcaagttaacccctccacatgtgatcttggtcttcactctttanggaatttttgcccacaaataaatgcagtgtgccttatgttggagacaaaataaccaactattcccaaccttatgatctcaatctacttaatccctcttagccagtaacatccttctagaaaaggggcaacaactcactacatggacatacttgcca

SEQ ID NO: 942 - DNA, 451 bp, Homo sapiens
ggtctcagtatgggaaaaacttgtaatgtcttaaaggcacatcagtaaggattggttcaatacatgtccagatactctgaagccatttgaaaagttgtgcaagagtattttatgtgggaaaatattcacgatatattgctaagtaaaagattatgaaactataggagtttttatttacaaatatactggctgtgtgtgtgtccatgtatgtatgtatatatgtatatgtgtgtgtgtatatatatatataaatacatcaaaaataaacatatactagcatattgatgttgttggtggatttattggtaatgctgctctcctccaccacccccaagtccacccacctttgaactttctcattcttttcccagttttctgcagtcagtatatattacgtttgtattagaaaagaaaatgttggccgggtgtggtggctcacacctgtaatccc

SEQ ID NO: 943 - DNA, 474 bp, Homo sapiens
acagaaggggaaggtagactctttccaaacctttgataaaggggctgctcaaaaaaccacgaccttgggcctctgctaaaaccatggctttaagtaaggagggagcagatatataaaaaaccttatccctctttctaatctcttatgtcctgtgagtgtcacccattgagtaaacccaagtggaagtcagcaggaaagtagctgggatgatgcagtctttacaggctatgatgtaaggaagcatgagattaatgagggcagaggggtgaaactgcttccagcttgacttccatccaatgcttgaggcatcttggagattgtcagtgacctacagaactttcctatatatacaataagaggagttaattcaagaccggtgcataagccaatcatcaacctcctattgaggaggaagaaatgagaggcctgagaaggaaagtgcatcaaactccccttactaacatcatacctgtc

SEQ ID NO: 944 - DNA, 554 bp, Homo sapiens
ggccgggcgcggtggcgcgtgcctgtaatcccaggtagctgggattacaggcatgtgccatcatgcccagctaatttttgtatttttagtagagatggagtttcatcatgttggccagactggtctcaaactcctgacctcaggtgatctgcccgccttggcctcccaaagagctgggattacaggcacgagccactgtgcccatccggaggttactttaatttaagggccagatttccagtttgggatgacaaggtacctcaaataggtcagaaaataatagattggaatccctgaaagtaattctgagtctgtccatgttaggaataacctgaggccaaacccttggattcaagaaaatccttaaatctaaaaagttgccaggtgcagtggctcatgtctataatcccgggactttgggaagctgagatgggtggattgcttgagcccaggaattcaagaacagcctgggcaagaaagtgagactgtctccacaaaaaatgtaaaaaattaaataaaaaaattagccagggtggtggtgcacacctctagtc

SEQ ID NO: 945 - DNA, 611 bp, Homo sapiens
gagccctacttttatttatacctatcttgccaatgagaggccaagtcaatttttcaaggttacagagctattaagtggtagcactggaactctaacccagataatcttgctcaaaaattgtttttctaaacactaatctaagctgcctctcacatgcaactaggagggcctattgctatagaaaatatatttaaaaatggatacctgttgtagggatgatgtcagtcttgagatacttagagaacatcctcttggtaggtagcttgctggatgtgagtcttaagtttaagaaagatggctgggttaaagatacagatttaggagttgccaatctatgggattagggaaggtcgaacaagtaggtgagctcacttagtggttcccaaacactaatccacaggccatttcggatccatattgaagtttataacaactctttgcaaagcagatcaataaggattgttgaggagtttagtgcctaaattctcttttccccttatgtaattacagtgaatagagaatacacacaaaatatagtcattggaacttagctaagacctaaagtcaaatgggctctattactcactctgtacacctaaaacatacaatct

SEQ ID NO: 946 - DNA, 486 bp, Homo sapiens
  misc_feature 415: n = A,T,C or G
acagaaggggtgcacttgcgatcttgattgacacgagtggcacccttttgcaaaagtaaattgccttgctgaggaaactaaatatatgtttgagtgctgtttcttttgtggcatcggaaattcatttataacaattttggtggcccgtacagggggcccattctcctctggggaggggtctccagtactttcccgtgtggaggcgcgcccagtcaccttgttgcggtagcctcaaggtgaggaatcgagacccaccaagtatgatgaataaacccagactctcagcaatgcaggaaaggaacaaacgggcagcttgggaaaagggggctcacataccacagcgactaggtaaactctacacagaccaaggcatcacgtccagtggagtgcttgtcctgcaagagacagggctcangagctcgcacgttccacagcgcaccacacccaacctcagcccacctgggctctcccagccgcctacctctt

SEQ ID NO: 947 - DNA, 602 bp, Homo sapiens
  misc_feature 271: n = A,T,C or G
gcacttacaaatcaactcatcaacaagtcacagaaggcataattttaattctgaaagagaatataaatcctatgagccctggcaatgtccacattgaaatttatgacaatagtttgggaggtggaagcagagaaagagacctgatgggcgtgtgggaaccctactattaaatagcacagagggaagaagaaccgttttaaggtgaaagactacagaataaagttttgagaatattatttaaagtcctgatggtaaccgatagaaaacctanaaataagattgtatctgactaaatatgggacaagtcaggaggagtgtagagtaatattgtgtgactgagcacaatccccacgtttggtagcccctgagatggactcccgtgatccctgacccgagctattgtaacactttgtaatcccatccgtttgaccatagaccagacttactgacttctaacaaataggatacaacagaagtgttgagatgtcacttcccagattagtttacacagaaactttggctttatctgaggcacccactctattgctctccggattgctccaagggaagacagctgccatttgatgagctgcccacatgac

SEQ ID NO: 948 - DNA, 489 bp, Homo sapiens
cagctctgtctcaacacctctttttaggtaatcaatgctgccaaggctactaccttgcacaactccaggaggcactgttgacttaaagtacatggagcacagtgaatggtgcccattgggatccctgctagtcctgcaacatcctctggaattgtgcagtgtggtggccttcatggtgttctttttcatttcctgtgccaaaaatcaaggcgtcattttgctaaaaataggaaaaaataataaatttcaagtaatgttttgcctctaagcattttccaaaatgtcttaatgagtcttaaaaaaaaaaagcaggggggaggaatgggcgccatggctcacgcctgtaatcctttggtaggccaaggcaggcaaattgcctgaggttggtagttggaaaccaaactggccatcatggtgaaatgctgtctctactaaaaatacaaaaattatctgggcgtggtggcaggcacatgtaattctggctacttg

SEQ ID NO: 949 - DNA, 535 bp, Homo sapiens
acagaagggctcagttaggtattattaatgactcttatcctcaaggaagatttagttctgaagttctctgtgtaattcagattattcacatactgatttaactggtcttaacttatttgccatatatatgtgtgtgtgtgtgtgtgtatgtgtgtgtgtgtgtgtgtgtgtgtgtgtgttttggattataactaccttagcaagataggtacttagaaatatctcttgattcggcatttatggagtatctactatgtgctagcatagtacaaactttctaaatgaatggttcagaaaccaccaattttagaatcacctctggtgcttgctaatgcatgttaaatatatagattcctacgctccattgtatatctaccataacacattatgtatgtgtgaggccctggactctgcatgttatacagggtactgtttgaaacttacctgtgagcatctctccagagtgggcaatagtagcagcacccatgctagtaacagtggccgtggcctgagcaaaatgataaaaatgtgttcc

SEQ ID NO: 950 - DNA, 613 bp, Homo sapiens
  misc_feature 315, 463: n = A,T,C or G
gagagtctttggaaaaaatttatcctgcattcacaatgaagattcatttttttatgcacttgtattgcttcttccaccactgtgacacggttcgaagttttccttctattctttttcatgttactagaatctgcatagtccctatggatttataaaaaattctaccaataatatcactattcattatgttcagctcagattttcctgggaacatgtaacactcacaatttggcttctaatatatcacccaaaggagagatgacagtttgaagattatcaaaattcaggaatcttgtttctactgcacttcattangtgtatgtgatgaggtgtgtgggggagggaatgattggatatatgttgtgtgttttggaaagccactttacctctctttcaatgtttttgtccatcaaatagagattataataccttatccatcattcttggtggttgtggagttcangtgagaaatgaggtacagtgcaataaaaactaacacttaactatggctattaatgcaatgttataggttatttattataaataattgtttagcatctatatggttttgccttttaatcataatggtaaaataaatgttaaaaatgacatt

SEQ ID NO: 951 - DNA, 607 bp, Homo sapiens
cgacagaagggtacatatttgcatataggattaaaagaatgacttccgtaaaacgtctagcacagagctacagagtgtatttttaatacattacagttcttgagtaaagatgattatttgataacactaagtgatatgaagccaagaaatgtagtagtgttcgaatcctttccacctcccttactcttgggttctgactttagaaactaagtaattccaggacataagtgaaaacacatttcaactgccctctattatacttacttggtaaattagcctgcgcattatttttaaaataaattttgttctattgctaaaatgccttctctagaaagtttctgtctgttgaattcattatttaaaattgaatcttactgctttgggtaaatatcagtatgtttactatatatttgcattgtgctggcattaggtaagcattcatacagtgttccttcttatgaagagtgacatattttataagagtggaaaaccatggaaatgaattctcatagtttaataaaatatatccagtgtctgtcttgcaaaatattgtaataccatatagttaataatataataattaatattcttaaacatttccaaaaga

SEQ ID NO: 952 - DNA, 390 bp, Homo sapiens
ttttgcatccttgaaatcccaagtggtaaatgctccaactaaatattatatatagaaaacagggatattataaacagattatcttgaaggactatgcacaaaacattaccactaattacatactgtaggagcataattataaaatctattggaaataatccatatatggataatacagctacaaaagataaatattgggactgccctttctgtgataatacaaatgacatgatcccttacttataccttacacaaaaattaattcaagatggattaaagacttaaatgttagacctgaaaccgtaaaaaccctataagaaaatctatgcattaccattcaggacatgggcatgagcaaggacttcatatctaaaacaccatattcaatgg

SEQ ID NO: 953 - DNA, 536 bp, Homo sapiens
tacgctgcgtgaagagacagaagggccctctcctctctgtcccaggaatgccacgctgcccttcacgctggcatgctgcctgtcggttctgtgctattcctttatgacctgtagattcattatctgtgtcgccacaaccttgtccttttagatttgcatatgtgttaagtccaatcattaaatccagtgatttttcaaaatagcaaaagtaggtgtataagtttccaacatgtgtataatttgaagctgaggaatgactaagaatgaaagaaactcagtttgttccactcagtgggctgcatgtgcctatggagtttcacttgaagcaaactctctcgaggcaaacctgctggcctcaccacctcagaccccgcctgaatgttcatgggagagacttggtgttgggtccagttttgagcttttttgaagggacagggagagcctggaatatgacttcctttaaaaacaaaaggtagttgtaggcaaggtcgggttttttttttgtattttctaaaataaaaatttatatttttttt

SEQ ID NO: 954 - DNA, 605 bp, Homo sapiens
tgcttgttgttttggccgaacggcctacggctgcgagaagagacagaggggagggagcttcaagactatgccggggaggagccaagatggccgaataggaacagctccggtctacagctcccagcgtgagcgacacagaagacgggtgatttctgcatttccatctgagggaacaagaatacttggacacaattcaaagaacaccatcagatacctgaggtctagcttctggtcccaaatctgtcattcagaagtgtgtaacttgacaatttgttgaatctcactggattttatttctgtcaagagtaaaattaaccagatgagaattatgctgagacatagcagtacctcaaaaagtggtggaggtaataagctgcaaagttggaacttgaatcccggacctcaagctccaaatccagaattcctcactttccccccgctacctgatacagaactggagaaaaataaatttgatttaattaagtgtagcagatcccaggaactattttatgtttaatgattactttcaagcttaatttgcctctatttaagtgtaactaacacataatctttaggatagacatctcggaattctttctgaatta

SEQ ID NO: 955 - DNA, 454 bp, Homo sapiens
cttctctacaacgcagagcgtggacggtggcggcagggactgcgaaggagcggtgggccacgaacccttagggcggagggcggagggcgctgctcatacccaacgcccgtgggccaggactcggaaagcctgagaaaacttttaaagtgttcatgtgattagatcaggcttgcctaaataatccctatttctaggtcaattgattggagaacttaattacatctgcaaaccccttcaccacagtacctagattgaataactgggagaaggtatgtgtacaccaatggctgggaatgttggtgggtcatcttagaattctttccagctgccgggtgtggtggctcacacctgtaatcccagcactttgggaggccgaggcaggtggtttgcctgaggtcgggagtttgagaccagcctgaccagcatggagaaaccctgtctctactaaaaatac

SEQ ID NO: 956 - DNA, 274 bp, Homo sapiens
acagagggggagaaagcaaaaccatattcctgctgctgtcagttttgatgcactgagaaaacttcagagacctaagctttttccagagaagagaagctttactggtgttccagccctaagtctcgctctgtcgctcaggctggagtgcaatggcgcgatctcggctcactgcaagctccgcctcctgggttcactccattctcctgcctcagcctccggagtagctgggactacaggcacccgccaccgcgcccagctaatttttttttttttt

SEQ ID NO: 957 - DNA, 502 bp, Homo sapiens
gcttgttgcttttggccgaacggcctacggctgcgagaagagacagaagggaacatcgttagatattttgtactcttttttgtattaagtattcaaaattgggtgtatgttttgccacccacattttcaggacccagtagccacatgtggctagtggctgctgtgacgggcaacacagatatggaacacttgtatcctcacagattattctagtggacagtgcagatctagagctagaggacatgggtttgagtccccactcccccactgtgtaaccttggggaaggttctggacctctcagagcctcaatttatcataaaatgaggataatcataatgccgtggtcctcactggacttgtgcaactaccactgatgtgctactaattactttcatttagtgcattcatacttccacttgggtgttttccacatattattattattttttttttttaagtagcgacagggtctcgctctgtcactagggctagtctcgacct

SEQ ID NO: 958 - DNA, 463 bp, Homo sapiens
cctacggctgcgagaagagacagagggaggtgatcatggctgggtttgatcacatatttgggtttagctagttgtgggccaatctagggcggcttcatttaaaacaactgagctctgctctatgtggtctcttgtccttcagtaggtaagaccaggtttgttcatatggcagtgacagtttctaagagaatgagaagtgtgcaaatcccttgagacctagacttgaaaccagaagaacatcaaaaccaattaaaatccaaggagtgagaaaataaacatcacctcttggtgggagaagctgcaaagttatattgcaaaacatgtggatacatgaagaattgcggccatttttgaaaatgaatgatcacaggtttttttttttgagagatgaccttaaactttaaaatatggtcttttattaaaatattaagtttttcacactacacctctttccttcccatat

SEQ ID NO: 959 - DNA, 595 bp, Homo sapiens
gtagtatctgaataagaaaccagacgttgtaattctggagccacatctgactctgtgacttgggatgagacactccagccctcagcatctgcttcatattccttatttatataattggcacggccatctgtgtgtgtgtgtgtgtatggattcaaatattttaaaaaggatgtgagaactctttggaaaccataatacatgctgtgagtgtaaggtgtttttgaggtcactgtgaatttcctcactgagactcaacctgacaatggaaatgtcttcttgtcccactaaacgctcctgcagaaatacccagcttctgcttggattgagaactgtcactttctgacacttcttccttatattgtatcgatacaaggtttcgggcagtttctgctttttgtgatagctgtgctgttggatctcacacttgctctatcaatctgtatctgtaaccaggagacagaaatcacgtagtaatttgaataactaaagttcaatataagaaattattaaccatagtggaattggagtaatgaaggattggctagtaagaagtagaactctaaagaagataggaatagataataagatacagcta

SEQ ID NO: 960 - DNA, 551 bp, Homo sapiens
acagaggggctaacttcctatctagtaaaattagattaagagtaacctatttgggctttctgacatgaaattcccaggcttcctctcatgaaaggggattcctaaagcagaaaatcaaaacaggtaagacagtgattcttgcattcctcagaatatgtctcctgactctaaatggttgtgtaccttttggaaatagctgcctttcacttctgtattaaaatgctttctccctttctctcctgtctccttctttctctctctgtatctgtcttccttctttttggtcttaacagtgtagagtgacatgaggtgcagcacttctcaaaaaaatattcacccattaattctgctatttttctccatccaaatctaagtataaattaccaggaaagagtggtctaaaactgacgatggtagtgaaaggttgtatctaaaaaaaaagttagattaataaagttagattaatagagcaatgtatataaacatggaaaacatagagaagaagaaactatagcagataataattccattcgcttaatacttattaattg

SEQ ID NO: 961 - DNA, 630 bp, Homo sapiens
agaagggtacatatttgcatataggattaaaagaatgacttccgtaaaacgtctagcacagagctacagagtgtatttttaatacattacagttcttgagtaaagatgattatttgataacactaagtgatatgaagccaagaaatgtagtagtgttcgaatcctttccacctcccttactcttgggttctgactttagaaactaagtaattccaggacataagtgaaaacacatttcaactgccctctattatacttacttggtaaattagcctgcgcattatttttaaaataaattttgttctattgctaaaatgccttctctagaaagtttctgtctgttgaattcattatttaaaattgaatcttactgctttgggtaaatatcagtatgtttactatatatttgcattgtgctggcattaggtaagcattcatacagtgttccttcttatgaagagtgacatattttataagagtggaaaaccatggaaatgaattctcatagtttaataaaatatatccagtgtctgtcttgcaaaatattgtaataccatatagttaataatataataattaatattcttaaacgtttccaaaagaccaagtatactatgaaaaaattttttt

SEQ ID NO: 962 - DNA, 593 bp, Homo sapiens
aattctcagggcccccgcaggcctgggagcggcctgtgataactggtgtatctggcaggagtagcagctgccccttggcgcgactgctggagccgcgaactagagaaacacagacacgcctcatagagcaacggcgtctctcggagcgtgaagcccgccaagctcgagctgagctttcgcttgccgtccaccactgcccaccactgtcgtttgctgccatcgcagacctgctgctgacttccatccctctggatccggcaaggtgtgtgctgtgctcctgatccagcaaggtgcccattgccagtcccgattgggctaaaggcttgccattgttcctgcacggctaagtgcctgggttcatcctaatcgagctgaacactagtcactgggttctacggttctcttccatgacccacggcttctaatagagctataacactcaccacatggcctaagattccattccttggaatccgtgaggccaagaaccccaggtcagagaacacgaggcttgccaccatcttggaagcgacccaccaccatcttggaagtggctcgccaccatcttgggagctctgtgagcaaggacccct

SEQ ID NO: 963 - DNA, 578 bp, Homo sapiens
acagaagggcccttataattatactgttataaaatgtacgttgtcttccaaatggatgagaaattcttgagagcaagcactgtctcattcatttttcttatccctgggaacctttgaagtaccaggcactctttcaggccctccggcactctcagagctttgagagggttaatttttagccctatgcaggtacaactactaaaatgaaatcacctacaatgtgatgcaccaccagaaacatccacatttatcatttgcctgtcttaaattatttttggaatatgctaaattaatacaatgcataggccaggcgcagtggctcacacctgtaatcccagtactttgggagggcgaggcgggcggatcacttgaggtcaggagttcaagaccagcttgaccaacatggtgaaaccccgtctctaccaaaatacaaaacttaggtgggtgtggtggtgtgcacctgtaatcccagctacttgggaggctgaggcaggaggattgcttgaacccagaaggcaaaagtttcagtgagctgagatcacgccactgcactccagcctgggtgacggagtgagact

SEQ ID NO: 964 - DNA, 559 bp, Homo sapiens
acagagggtgtgcaatcacaatagcatgacatgggtacaaatatagaagtatgttattaaagtattgagaattagctttcctaacctccccacctgcaatcttttactcctaatctccaaaaaatgaacaaatcattggttcaaaatggtcacaaattgtatgtggtgttaaaaatctattatttttattgtatataaaatgttgccaggtgtggtggctcatgcctgtaatcccagcactttgggaggccaaggcaggtggatcactaggtcaggagttcaagaccagcctggccaacatggtgaaaccccatctctactaaaaatacaaagattagctgggtgtggtggcgtgtgcctgtaatcccagcttctcgggaggctgaggcatgagaatcacttgaacctgggaggcagaggctacagcgagccaagatggtgccattgcactccagcctagatgacagagcaagactcagtctcgaaaaaaaaaaaagttatactagttgggcacgggggctcacacctgtaatcccagcactttggaaggccgaggcaa

SEQ ID NO: 965 - DNA, 526 bp, Homo sapiens
gcttgttgttttggccgagcggcctacggctgcgagaagagacagaggggccctttcctccttccaccatgtgagaatgcagcaagaaggtgccctgtatgaagcagagggccctcaccagcaccgaatccggtggcaccttgatgttgaacttctcggccttcagaactgtgacacagagaatgagtggaatactaatacattgaagggcaaaatcaaaaccccagaagatctctaaaagtctgaatgaatcagcccatattacaagataaagtccataatggtaaacggaaggctctggtcttggtttacaaaatccaaccactcaaatatgtagttgctggaagttttgtggccatggggatgctgacaaagattgcttgggatgcacacaaggcagcggcgaagcctgaggggtgctgccaggccgggctctccactggccacggatctacgcagccctggagtctggcccctggttgtatctctggaagctggtcctggccttggagttgacctgaaactc

SEQ ID NO: 966 - DNA, 631 bp, Homo sapiens
gatgcctgcctggggctgtggccttagctcagctacaggaatgggatcaactacagtgacttggaagctgaagggcaatggtcttgctcactctcctgttggtctttgcttccctgccggtgtcccccattgactgcccccagatggaaacctaagggcaaggtacccttagagaccagacttccagggaatatagcaaaggtagagagtgcaactgaagggccaagaaaaatattgagcacagtaaagttttgtaaatgagttcagataaccctctggggcaaaaaggaaggcatttaaacttgtaaaggaattactttttgcttgttaaatgttaacgtagtgactggagtttttggacctaatgatatcttagggaatcagagaagcgttgaagagattgtggttctatggtataaaaaagatagttccaaatgtttgctggtactctcattgagacatggaattaccgttccttctgtgagagctggatgccttttactggtcttctttgaccagtgaaattcagtagaagtgatgttctaggacttacaagtctaggtcataagaagtcttgcatattatgtgttagaacattctctctgggaactttaacctttgacccaccctg

SEQ ID NO: 967 - DNA, 557 bp, Homo sapiens
aactgtttcaggggctcttggaagagtctactgctcccaaatatctctgctacccactggccattgctttacattcctcaactaagctttcaccttttagtactaacctttgatgactgatcaaatgcaaatgccccaagaagactgaggataggagaaagaatatctctacctgtgaaacattgttagactgcctggctaggagttcattgttgttttctgaaggacgtaaccaaccactccaaaacttacaggcttaaaacaacaaacatgtatcatttcttatgattctgtgggttggctgggtggttcttctggctgaggcaggatggtctaggatagctacatccacatgtctggggtcccagctgagatgactggggctgttgaggcctttctccctgtggtgtcatcctccagaaggctgcccagatttgtccatatggtagcaggagtttcctcgaagcaagagagggcaagatccaacacagaagcacttttcaagctctgtttccatcacatttgccaatgtctcactgatgagcacaagttccatg

SEQ ID NO: 968 - DNA, 528 bp, Homo sapiens
acagaggggctttttcatcaggcatcctggagcccatgcaccttaaactttcccagcctctgctggccctgatcccttgtctctcaggacacagctcaaataccacctcctccagctcacctcacgcccaccatttggcaagtcctaagttcttgtcctgcatccaggaagaatgaggtatgcggacaactggagggtgaacaaggtggaaaggagctttattgagtgacagaacagctcttgggagacccaaagtgggtggctcctatctgcaggcaggtcatcccagtgaatgtccagctctcagtggagaggagacccagagtgggcagctcctattcgcagagtcatgtggaagcaccaggatcccattcctaccactgaaattaaacaaatgaaaaaaaattagcatgaaattctttgtgcgtggacagtgacctgagaagacaataagacatttcaaagcattgagttaaggataatgaagtttataaaatctagtggcaagatatagctgactcttgacac

SEQ ID NO: 969 - DNA, 661 bp, Homo sapiens
gcttgttgttttggccgagcggcctacggctgcgagaagagacagagggatgcccaatgtagttctggaattctaagccctgatgcgaggacaaatctttcaattttgctacttacaaactacaaagcttggccacatggcacttattctaaaattgatcacataattggaagtaaaacgctcctcagcaaatgcaaaagaactgaaatcataacagtctctcagaccacagcacaatcaaattagaactcaagattaagaaactcactcaaaaccacacaactacatggaaattgaacaacctgctcctgaatgactcctgggtaaataatgaaattgaggcagaatcaagaagttatttgaaactaatgagaacaaagagacaatgtatcagaatttctgggatgcagctaaagcagtgataaaagggaaatttatagcactaaatgcccacatcaaaaagctagacagatatcctaacatcacaactaaaagaactagagaaccaagagcaaataaaccccaaagctagcaaaaacaagaaataactaagatcagagtggaactgaagaaggtagagacatgaaaaacccttcagaacaacaacaaatccaggagctgtttttttttaaatttaatgaaatattaatagactgctagc

SEQ ID NO: 970 - DNA, 572 bp, Homo sapiens
gcttgttgcttttggccgagcggcctacggctgcgataagagacagaggggagagctcaagagctctgggccgtgagcaagcctccgatattctggtcccctgaacccgccttttaaatgcttattctgtctctttctaactcctatgtctccaccagactcagggtacccactgggtggtgtggggctggtttccctaacattccccaccaaataaagcagctccaaccttctagatggttgctcagctcagaagtcttagagaaattctgatgcctctcctcacatttgctctgtcggcaaatcctggtgtcacaagagggctcaggagggtttctggatgccaacgagaccccagccacagccggtccccagattcttgacatcatcacaagaaagaattcacaggttctacttgaatcatagtttctttgctcctggaagacccctgctattcccagtgatgctgcgaactggggttcaaagtggggtggcctggtgaggcctaaaatccatgtcccgtggagaactgcctgcatcccttacagaacctgccacatatttctgcagct

SEQ ID NO: 971 - DNA, 567 bp, Homo sapiens
acagaagggataagaagtcttgcatattatgtgttagaacattctctctgggaactttaacctttgacccaccctgtaagaaatctaactaccctgaaactaccgtgtcagcactccagttaacagacccagctgagctctgccttctagatgttgtccccacggcgtcggacatgtgactgtaaccatcttggactctttaaatctttctagctgccagatgaacaccgctgagtgacctcatctatgccatatggaacagaagaatcatctagcagatgatctagtgatctgagaattgatccttctcaaattcctggcctacaaaaattatgagataaaattaaatggtttttgttttaacccactacgttttggggcagtttgttaggcagcaacagataattgggaaatgctgctaccctctcagattgatgatccgttcattctatatctacattaataatgggaagtaacaacaatcctccactaacccctacacatacatatattcacaatacaactttaaccttccatttctatgataagtgatctagctagatcatg

SEQ ID NO: 972 - DNA, 374 bp, Homo sapiens
acagaaggggggcttcatgtaatcagctcaaggtttgaatacaccaaaaagacttacactctcgcaagtgaaaggcaattctttctgcctggtacccttcaaactgagacacaggcttttatccgtgccttcagaattcagcctgggcaacactggtctcgttccgtgactctcaagcgctgctggctcttgagacaagaactacatcaactctctcagttctcaagcctttggacttactctggaactaatccatcagctctcttgggtcgtcagcttgccaaccaactcatcctgaagatcttgggacttgccagccttcataatcacgtgggccaattcctttttttttttttttttggaaagggggttta

SEQ ID NO: 973 - DNA, 593 bp, Homo sapiens
acagaaggggttttcaattgtttggaatagtttcagaagaaatggtaccagctcctctttgtacctctggtagaacacagtgataaatccatctggacctgagctttttttgcgtctttctttgtcgcccaggctggagtgcagtggcgggatctcagctcactgcggcttacacctcccaggttcaagcgattcttctgcctcagcctctcaagtagccgggactacaggcatgcaccaccacacctggctaatctttgtattttcagtagagatagggtttcaccatgttggttagattggtctcaaactcctgacctcaggtgatctgcctgcctcagcctcccaaagtgctgggattacaggtgtgagccaccacgtctggccatctgagcctaagtcttaagaagacctgatcatttcaattcatgctcttaggagtctatagtcaccatttgagtcttgctggagaaagcatgtgaaaaaaccacaaggagggagcaagtggaaaggaagaagtcctgaaacaacagaaaagaatcaaagaaacaagtcaatcgggagaagcacagcctgctcgttttcccagttga

SEQ ID NO: 974 - DNA, 561 bp, Homo sapiens
gggtgcaataaacatatgtgtgcactttttttgtatttttagtagagacagggtttcaccatgttggccaggctggtctcaaactcctgacctcaggtgatccgcctgcctcggcctcccaaagtgctgggattacaggcgtgagccaccatgcctggcttatttttgtactaattctactcattgtcctctactctccttgttggtattccagcaaacatggcatcagtgctctgtttggtttctcttggtgctatatatagggttagatgctcagagaacctatgaggacaacaaattgtttttatcctccaagaatgggagggggaagtagctaaataggcctggtccatgtagctctaatgcagagaaatacttatctaggtaatgcaaaatacaaaacccagttgtgtctaatttacacaggtgatactgacactgtacatctggtggtagtaaacttataaaataaattatatagcacatgccttgccctgaagcacatgtgtacacacacacacacacacacacacacacacacacacaccccctgcacgtttg

SEQ ID NO: 975 - DNA, 535 bp, Homo sapiens
gtcatcccatgggatttgggggcaagaaaggtgcaacattctggtacccatgttgcttgctatataggaagtaataaaattctttgtctctgacccatgagtctcttgtcttttgccagcatccatgaagcaaacggtaacaggccaatttatcagcttctaagtaggttaaaatatcagatctgccagtttcctgtgagtagatgagtagtaaatgaccattaagtattccataaatcatggattggagagagggaaggaaacaattagtgcatatctacaaggactttcttctgtaacataaaaaattttaaaacccctggtccttattgagcatttaacatatttttcttaaatttcccaaagtacttgaaacaagtacagtaggtgttagtttggtcaacacagcctgtttgcctgtgttgtttatattttccctctacatctttctatgttccctattatttttttgtctcctttatttctcagcacatgaacaggctcaagggtgattgatacttgcaggaagatttta

SEQ ID NO: 976 - DNA, 593 bp, Homo sapiens
gggcacccactctattgctctccggattgctccaagggaagacagctgccatttgatgagctgcccacatgacagagaacaggccaatagccctcaaagaattgaaacctaccaaccaggggagtgagattggaagcatatattccttcgattaagagttcagatgagaagacagttcctgccaataccttgattgcaaccttatgagaaatcttgaggtggagacctagctaaaccatgcctagattcccgactcacagactgtgagataatatactaaaaatacatcactaatttagaataaaaatcaaacaagctgtcgaagaatgtgcacaaaagttgaaaaaatattacaccaaagatgatagacaaagcacggcaatccattctaagaaaagaggtatttgcaagggcaaatgagaacaaatggagccaaagcaataaattaagagaggaaaatttttgtaagctataaaaatgatctgagcttgtagtcaaaaggagtcaagatattgcatgcaacattgatgagtagagacccatgcttagaaatcatctgaaaaaaagtattttagaaataaagggagtaagcc

SEQ ID NO: 977 - DNA, 508 bp, Homo sapiens
  misc_feature 85: n = A,T,C or G
ggttgtagaaagtaggagcagcaaaagcttctgaacttagtaataagctgcttgccccgggacagaatctcactctgtcacccangctggagtgcagtggcatgatcttggctcactgcaacctccacctcctgggttcaagcgattctcctgcctcagcctcccgggtagctgggattacagctgcatcgcgagagctcagaagctcagtcaatgcaaaacagaaggcactgagggaaaatttcagatgagaatggacgtaccctctccagaagcaaagaagtttgcaaattactttttgaagccctctctacataattttgaggttaaaaatgctttcctcctgcgaaggagagactttaatctggattgtatgctggagctcaatgattgatccaaatcagagtccagaggcctcatgagaatgatgatcgtcagggctacagtggggcaactgcagatggagcttgcccctctcctccataaatggggaagagcctctcacctc

SEQ ID NO: 978 - DNA, 466 bp, Homo sapiens
atacactatgatttcactcatggaaagtttttaaatagcaaaattaaacaatatattgaggaggaacaagggaatgtttaatagaaaattcatactagccagttggctgttatgaaatcagtccacaaaggggcttctaatgtaacattctggtaacctgagtgcaggtacatgggtacttcaatggttctttaactgtataagtaagttttacaaattttttccatatttatactgcatttcacaatttacatttaaagaatatttttaaaatatataaacaggccgggcgcggtggctcacgcctgtaatcccaggactgtgggaggccaaggcaggtggatcacctgaggtcaggagttccagaacaacctggccaacatggtgaaaccccatctctactaaaaatacaaaattagccgggcacggtggcaggtgcctgtaatcccagctactcagaaggcta

SEQ ID NO: 979 - DNA, 495 bp, Homo sapiens
  misc_feature 69: n = A,T,C or G
ggcctacggctgcgagaagagacagagggagttttctgccagttcctttcattggcagaacctacccanaactcagcttgcaagggagtctgggaaatgtagtttgtaggctttcagagcttggcagcatatataagaaaacagaagagtaaatacagtgctaagagcatcagatagttacagtcagctatgaacactgcataaataagaaaggactccacagttaccttccaattcctagtctggttgccatattacactgtagtaaagggaggaaaaagtacagaagggaatgattcgagctcaagtgttatgaagaaaactaaaaatggatgtagataagatttgactgaatagaatcggagggtttctaggcagttagttgatcaatataaataaagggagattacaatgggtacattgattacagtttagaggatgttatatattttagagcaatgagaaatcaggttgaatatgtaatcccagctactc

SEQ ID NO: 980 - DNA, 566 bp, Homo sapiens
ggggcaacctgatggggtcccttttcagctgtggaacctttgttctttctctgtttgcaataaatcttgccactgctcactctttgggtccacactgcttttatgagctgtaacactcaccgcgaaggtccgcagcttcactcctgaagccagcgagaccacgagcctactgggaggaacgaacaactcccgacgcgccgccttaagagctgtaacactcaccgcgaaggtctgcagcttcactcctgagccagcgagaccacgaacccaccagaaggaaaaaactccgaacacatctgaacatcagaagcaacaaactccggacacgccgcctttaagaactgtaacactcactgcgagggtccgcggcttcattcttgaagtgagtgagaccaagaacccaccagttctggacacaatttcaagtcctcaggtgccatcaatattctgaaaatggcagtgatttttattcaacctgtataaggcactttcaccatgtacctggaagcaacatctacatctttttcaagtaatagtttccaaatattaattcataaatattgcta

SEQ ID NO: 981 - DNA, 527 bp, Homo sapiens
ccagggccacctgcatcgcggcccaacctgtctggggcctcgtcctctctcgtgtacacacaggagctcctggcaccccggagggcagcccccaaccctgaaacacacagcggcagcggcctgacctccccggcactctctacgtcatgtgtctcagatggggacctgtgagtcccggaacctgactcacgggtggtgtgtctctcgggaccaagtggatgttgagataccagccggacagctattataccaatgcagaaagaaggaaatggtggcttgggtactagtgccgggggacgggggagaggacatggttacttgggccaaaggatggtgctgaagtggggagaaggggtctgattccagatggagtctcactctgtctccaaggctggagtgcagtggcacaacctcggctcactgcaacctccacctccctcattcaagtgattctcctgcctcagtctccccagtagctgggattacaggcgcatgccaccacgcccggatgatttttgtatttttag

SEQ ID NO: 982 - DNA, 401 bp, Homo sapiens
  misc_feature 127: n = A,T,C or G
ggtatgtgtttgtgagtgaatgtgtgagattgtgttggtgtgtgtgtgtgcgtatgtgtgtgtgtgtgtgtgtgtgtgtgtgtgtgtgtgtagtggaggttgtggctctcatttccttccttcctanaaaaacaaattcacacgtgtcttgggaacatttttccaaggaaagctgcaggtctgtttggacacacatcttacccgctccattcttgcaagaaagcatggtttgatatggcctgtgcatcatctgctatagcatcacctgtgcagcaagagtatagatggctctgtttccaatggggtctctgaagaaggacgctgatatcacccagatatggatgactcacatgagcatcaccatctgctgtgtctaagagcattcacatctctttcttctg

SEQ ID NO: 983 - DNA, 543 bp, Homo sapiens
tcaacaaccacgcaaatgtcagcatccctgaaggacggagtggaggcttagaggtgggtcccaaggaagagaccctccagagagcagggagggctcgcagttgcattttgagaatccaaaataaatagagctagactagagggttctgtgtggctcaatggaatgagcaaggattctggagtcaggtggacctgggttgaaatcttggcttctcagagcaatggatggtcttttcccatcttcatagcctacacttgattaaggtgtaataaaacccaaagggagggattgaaaccgtctttgcaaaaatatgactgagacagtgaaagagatctaacttaactgactccatcttgcttccaacctccaagctgtccttgttcattcctgggtgtaggctgaactgactttgggagaaacttacagtttatagtttaaacaaagatggtaacagcactttcccaaagcagacctccttcttgcctggggactagattgcctttgtaggactaacattagccacaagattagaaattatgtttt

SEQ ID NO: 984 - DNA, 576 bp, Homo sapiens
acagagggtcctcttggggtaattagtaatcttgaaagttgcactaagttatcagtagagtatcagaaaataagacctttggaaaaagatctaaatatattcagctcaatagcactcaatgcaatatgaaaccagggatgatactggacagaaaactttaaggaacaggaattcaatccctcatgtcaacatatgcatcagacacaaaccataatttaccatgcactgacttcttgtttttctaaagacaatgtttaaaagtttgagctgaattatatattagtgacagaattgcatttccacaagtttttaatttaaatagcctacatgttaaaacaaggacctctcagatttacttaagagttctacataaacacaaaaaatgttctagaccaaccgtttcaattttagaggcaccatgtggacacatagcctttaaaagatattaaaattttataaaatacacatgcagcttaatctttacttacttgttttcaaagcactttgtttaaataattttcttcaaatttgacctgaaataagaacagctatctccaccagtagaaaattgaggct

SEQ ID NO: 985 - DNA, 539 bp, Homo sapiens
acagaagggttattaagcactaatacattaaacagtctgtcctcagcactgtgagtaattatctaatgtaattctcagaacaaccctagaaggaaggttctgttcttaggtctactttacagctgaagaaatggaaactaagctccaagtactgcctaaccacttgttagaataaaaccctctaaattatgtccttaatgttccatagcaaggttttactctgtaatacttaggtcttctctatgcctatgctaggcacacttatactcacaaactccttaaaacgtgaaagaactctatagggagtatttttcatttccatttcatagatcaggaaacagaaattcagagatttggcaagttacatggcagaaccagaatgcaaatgtagaacttctcataccaacctgttatctttctgaaacacctaaagtgattgaaaaattacattgatatgcatagaaacattgcatttatatttaatttggttactataagtaatttaaacagtcatagaagctgactcaaaatctgacctt

SEQ ID NO: 986 - DNA, 435 bp, Homo sapiens
gggtgttcacttgtatttataacctgaatacccagtaccccccccccccccaaaaaaaagccggtggaacagatacaaaaaaaattttttaaaactttttttttattttttgaaatggattctgtgttgcccaggttggtcttgaactgccgggctaaagccaccctcctgcctgggtatcccaaacccctgggattacaggcttgacccattgggcccacccaaaaataaagttttcatggactctgacttttatacttttatgaccttacagtctattaggggagttgatagtatggaatgggggtgtgtgtgtctgtgtgtgtgtgtgtgtgtttgtgtgtttaaaaaaggtaagtccctaaaaaagagtgatccaaatttcaaaaaaacaaaaatttttttctagggggggggaatagtaaagcgatttca

SEQ ID NO: 987 - DNA, 564 bp, Homo sapiens
  misc_feature 481: n = A,T,C or G
gggcaccatgttgcccaggctggtctcaaactcctgacctcaggtgatctgcccacctcagcctcctaaagtgctaggattacaggcatgagtcaccacgcccagcctgattttcactgcttctgagaaaatcttcggaaagcagaggagattattttaagagcaatgggatctggagttgccaaagagcctgcgattccccctggttaatctatctgtctggtaacagaaaagacttaaccgtggaagggagacaccctgacctaagccaaggtggccctctcagtttcttttgtaatagctgtactgtcaacagaggcacgcagccccaggccactttctaagacccaaaccagccagatatctctttgacaacatctatagctctgcctacaccacccaattcatggagagagagtttctaagtaatttgctacaagaagtagatgtcttcactcctgtgaggctggctggaacgtangtgggaggcggccactgggacatcagatcaagtttggtttctccctgatcacgggccgttagcaaatttgaaagatttcttgg

SEQ ID NO: 988 - DNA, 574 bp, Homo sapiens
agggatttagattaagtaaatttgctgaggctcctgaggaaggtcttcaagactcagaccttggttatagattaaaagaagttaatcacttgtctttagatgaatgcacacctacacatagacatatagcttagaaggtatataagctctggaaaactttgtaattgtgagttggtctggcagtaatttccaggccttctccctgtaaccggctacagaaataaaaactcccttcctccccagttaatctgcatctcgttattgggcctcaataaatagcagcctgaccctcagcttggtccaggaacactgggattataggcatgagccactgcacccagagatccttaagatttcttaaaccccacattcaagtgagaaaagaggaaccttctctgccccatgtttaatacaattaagtttcaatagcttttgacctatgtactgttgttacagatggtgcaagggtgtatttggaaaggacaacacagggcagctgtatatgattgagtgattgggaatcatagttgtattatgagttgatgaagtcccaggatattggaaaggaaaacta

SEQ ID NO: 989 - DNA, 488 bp, Homo sapiens
aattgtaaggcaaatttatgaaatcaggatataacaggataggattattagaagatctcaaaggatttttgatattctgtccccctatgtgcaaatgttctcagatgggtcagactccttcattcttgttttggcacttggagggaaagatttatttctaaattgaatttgttcaggacagtttttccgaatgacacatatcaaatctgtagttttatataaatattaaaggctttgaaagaaaatgaggaaagataaactggtgttgattgagttaaagagttccattatttcctcaaatgagaactaggtatatattgtagaccaggaacctacaagatataactatttgaggccgggcatggtagctcatgcctgtaatcccagtgctttgggaggccgaggcaggcagatcacctgaggtcaggggttcgagaccagcctgaccaacatggagaaaccctgcctctcctaaaaatacaaaaatt

SEQ ID NO: 990 - DNA, 588 bp, Homo sapiens
gctctcttccattctccctccttttactcttaattatttgctttcctttccttttatcataaaaaactaggtcattctgtttgattaattgtgtaattttcagttttagagtacagatgctcctgcacttatgatgccattacatctcaataaacccatcataagtttaaaatattgtaagtcaaaatgcatttaaacatctaacctgaatatcatagttcagcctagcctagattatgtaatcagaacatttacattagcctacagttaggcaaaattatctaacacaaagcccattgaataataaagtgttgactatctcatgtaatttatcaatactgtactgacagtgcaaaacagaatggttgtatgggtactagaagtatggtttctactgagtgcatattgcttttacaccatcatgaagctggaaaatcgcaatttgggcaccatctgtatttgttttatttgtccccttcctcaatagattatgagtttcttgaaaacacagattgtaccacatccatttttgtatacatactgtctaagcatagtttggcacctagtagggaatgaatgtacaaatac

SEQ ID NO: 991 - DNA, 538 bp, Homo sapiens
  misc_feature 212: n = A,T,C or G
gactgcacatagctgctggctgcagtggggtgggcagctccagtctccagcacaagagccagctccttgcgaggctacggctggaccagacatcccacaagcagcttccacagatggcactagggaatgcagtggcacccagaagcttgaaggcaccaggaaccacagagccccaaagagggtgtcacagtcctggcttggggaactcctanatctgggctccctgaaggactgcagctcttctctccttcttgtcacccacaacatgactttgcaccacagaatgtccaggatatatcaggaaggagcaatgagggaaattaccctgagaaggtaatagctgaattgaatatataagaaagaaagttaaaagtggcggggaaggtaaaataaggaggaagcattcaggcataagagcagccctaatatagctcttatagcctcatcaaatggtcggtgagatctgagcactgaaagcagcaggaagaaaggagaaacattcagctacagaggtggatccaatgtagtggcaagagtc

SEQ ID NO: 992 - DNA, 547 bp, Homo sapiens
cagggctccccgctcctccttctgtcagttccctggggcttgtatctacagccacagagaccacagccctggccattctcctggaaggcccatttacttccctgatacaaaagtccccacactccctcctcccttccatgccccagttggcccaagagcttatctcagcttaagttggggctgcttcacttggctgcccattcactaatgccctggctgcatgcctgaccactcaagtcagaccaggagctaacaaggtgcagcccggccaggcgaggtggctcacgcctgtaatcccagcattttgggaggccaaggtgggcggatcacgaggtcaggagatcgagagcatcctggctaacaaggtgaaaccccgtctctactaaaaatacaaaaaattagccaggcgtggtggcgggcgcctgtagtcccagctactcgggaggctgaggcaggagaatggcatgaatccgggaggcggagcttgcagtgagtggagatcgcgccactgcactccagcctgggcaacagagcgagactctgtctc

SEQ ID NO: 993 - DNA, 329 bp, Homo sapiens
tcccttgcagatactgagggattactatattggttaactggttaacagcaccttattggattaaccctatagtaagaattgtttaaacagaaacatttaaaatgaattttttttttttttgaaaaaaattcttgctctgtcgcccaggctggagtgcactggttcaagtgattctcctgcctcattctcccaagtagctgggattacaggcacacgccaccatgcctggctaatttttgtatttttagaaaaaacagggtttcaccatgttggctaggctggggtcgacctcctgacctcaggggatctgcctgcctcggcctcccaaa

SEQ ID NO: 994 - DNA, 458 bp, Homo sapiens
gggccccactaaattttgggacaatttttatgcaacaataggtacaaaaatacaagtggtattatcttacaaatgcaaaataggcttaacatttacaactcggccaggcaaggtggttcacacctgtaatcccagcactttgggaggccgaggcgggtggatcacgaggtcaggagatcaagaccatcctggctaacatggtgaaaccctgtctctactaaaaatgcaaaaaattagcagggcgtggtggcaggcgcctgtagtcccagctactcgggaggctgaggcaggagaatggaatgaacccggcatgcagagcttgcagtgagccgagatcacgccactgcactctatcctgggcgacagagcgagactccgtcttggccgggcaaggcgtggtggctcaagctgtaattccagcactttgggaggccaaggcaggaggactgcttaagccc

SEQ ID NO: 995 - DNA, 425 bp, Homo sapiens
  misc_feature 62, 133: n = A,T,C or G
ccatgcaacacacataagtgctacctgcttcaactgaagacaaaaatcagaataaagcctangagagcttgtgcactgaacatatcctaaccagtccattgtctgtgtcaaacattgtccttcttctacttangtagcctttcattagtgtgatggttaatattgagtatcaacctgattggattgaaggatgcaaagtattgatcctgggtgtgtctgtgagggtgttaacatttgagtcagtgggctggggaaggcagacccacccttactctgggtgggcaccatctaatcagctgccagcgcagttagaatataaagcaggcagataaagcgtgaaaagactagacaggcctagcctcccagcttacatctttctccagtgctggatgcttcctatcctcaaatattggactccacgttct

SEQ ID NO: 996 - DNA, 435 bp, Homo sapiens
gggattctgtaagtgatatgagggacatatggtcaggagggtgaaatgaaagaacagaggaagggtgctgagggactgtaatgattcttcaggaaaactctaaagagagattgatgccagaggtgagtgtggaatggcaagtaggagttattctgattatgtatgggagaggggtaagcatgttttaaggcacagagccatgagagagcgtacctggcatgggtatttgcaaggagcttatcatggctgcagcagaaaacaagtgtgaagggatgaagtataaagcggctccaccagtaaatgtaggtcattttaaggacttcggattgtctaatagaaagagcttagtggtcagcttagaattttagaaagcctgtggtcagcttggaattttataaaaattattctggcaacgttttggtgaatgaataggat

SEQ ID NO: 997 - DNA, 566 bp, Homo sapiens
gaaggaaaccagattgattaaattatatgtggatccaatagtaattatttgttgtctactttttggtaaatatttttcatatttcatatccaaaatgtaggccacacactttcggaggctgaggtgggtggatcacttgaggccaggtgtttgagaccagcccagtcaacatggtgaaaccccctctctactaaaaatacaaaaattagctgggtgtggtggctcatgcctgtaattccagctttgcgggagggagaggaacgagaaacgcttgaaccggggaggtggaggttgcagtgagccgagatcatgccactgcactccagcctgggtgatggagtgggactctgtctcaaaaaaaggaaaaacaaaacataacaaacagaataaaaaaaaaattaaaaaaaaaagaaattgtcgtgagaccacttaaaactggacgatgacctttctttttttatattagagaatataatagaactaagaaatctcaatcaggtgtggcagctcacacctgtaatctcagcactttgggaggccaaggctgggtggatcacttgaggcca

SEQ ID NO: 998 - DNA, 555 bp, Homo sapiens
ggggattctgtagcagtactctacaggtacggagtattctataatatgagtatgtgatggttttagaagtctgcatgggatatttacattgtttccttcaagaataacatggtatgtggattatttcaaacacatgttctagtttcatatgaagatgtgctttttaatgttttaaaaaaattgtgattgaggtacaacatacagacagtaaaatactaaagtgtatagctcagtgagtttgtacgcatgtctacactgcgtctccattagctagataactgttctaagggcttgctttcttgagtcgcacaattccctgtatttacctaaaggattaattaaaggaaccacttctacttgtatcacaccatgctggtctctttctattccactagttcagtaaagaaagaggacacactctttttccctctaatcagatgggtggggataggttaagagataagtgagtcttgtctgtagagtcctctattctcaatcatctatagcatgcttggccttatagctgtttagctttttataaagaaatgctccccc

SEQ ID NO: 999 - DNA, 580 bp, Homo sapiens
ggggaaggcaggattgttcggagatgccggatggcagccatgagaaagaccccactggtctgagaggtctgtgcaggaatgcacggagcctgggaaacacagagagctaagggcacgccagtgcacgcctaatgcaggcggggtgacacctgcacagttccatctgctgcttcacgacgtgttgctaactcagtcgccgaccactggactctgggctgctccattcctaacttccacagtgttgatggataccgatgcaagcccttctggggaagacacattgagagcctctctcagccatgcattcctcagcctgactgcaaggtcgcagccccctacaaagcccagtctgagtgcttcccaggctgccatgtgccaggtctccctcccacggctgtcctggaaggctctgctttgcaccaacttgccagcacttggcattagtcaaccctctagcttttaccaatctgatgggtgtaaagggaattcctgcgttttactttgcatttctctgattcctgtgggtttgagcagctcttcattgaattgtgtgtcatttgcaccttcccttctgggaatt

SEQ ID NO: 1000 - DNA, 329 bp, Homo sapiens
  misc_feature 14: n = A,T,C or G
tcctcctgcctcancctcctgagtatctgggaccacaggcatgcaccaccacatctggctaattcttgtatgttttggtagatatgggatctcttgctatgttgcccaggctggtcttgaactcctggctcaagggattctcctgcctcagcgctcccaaagtgctaggattacaggtgtgagtaaccacacctagcccacatgaggatattttaagccaagacccaacaaaggtggaaaaacacaccatagagtgcacagatgagttcgagcaaaagaaaaatatttgtaaaaaacttggccaggcgcagtagctcacacctgtaatc

SEQ ID NO: 1001 - DNA, 576 bp, Homo sapiens
  misc_feature 512: n = A,T,C or G
gggtacttaaaacatagtaaatttaagtgtttttattgctatgtctatttatttttattattacatgaatatgagttgtcaaaacaggaaatctgggctccaattcccatttggatatttatgagctttgaccttgggcaagtttcttaaacttggcaaaatctccatatgtataagctggaaaaagtggagaaatccaccttttcaggcctgttttgagactaaagtggcataatgtatgtaaagtgtgagatccttagttaccactcaaagaataattcctctcccataagatacaggaaaaacataaaaagaaaaaagaaatgaaagtctgtgaagctttctctttcgtataataataaacaattcagtgacctctacatatcaactgcaaatgcgaattactcatgttaaatatgagtgcagaaaatggaaatgggccagacatggtggctcatgcctgtagtcctaaaatatttggaggctgaggtgggaaaatcatttgagcctangagttggagaccagcctgggcaacatggcaaaaccctgtatctacaaaaattttttttctaatt

SEQ ID NO: 1002 - DNA, 586 bp, Homo sapiens
  misc_feature 433: n = A,T,C or G
gtcatacatgagaaagcctccctatactggtggcttgcatgagattaagagttcctagagaaataataacataattaaaatgattcaatatatctatttgtccatatgtagtgtgccagcttctaataaaagataataaaaacccaattcaaaaaaattagaagatactggaatgcaacatagtggagaagaaccagtggatttaggtaatattctgatgttcatcacacagagaggaatgtataattataaagaggtttaagggcaggtgtggtggctcacgcctgtaatcccagcactttgggaggtccaggcaggtggatcacctgaggtcaggaatttgagaccagcctggccaatatggtgaaaccccatctccactaaaaatacaaaaattagcatagtggtgtgtgcttgtagccccagctactanggaggctgaggcaggagaattgcttgaacctgggaggcggaggttgcagtgagctgaaatcacgccactgcactccagcctgggtgacacagcgaaactccgtctctaaataaataaataaataaataagatgtttaagataaagcatatttg

SEQ ID NO: 1003 - DNA, 449 bp, Homo sapiens
aaaagcactatgagatatccttgaatggagagactattaatagggtttggaatggagaggggcacagcagctgtcagtcaaatcttcatgagaagtatttgaatagggtcttgataggatgtagatatataaaaataggtaaagagcttcctggacaaaaaaaataagagtggcagggtcagctagctataaggcagatctggggatgatgaatgataatttttgtgccagttactgaatcttcttaaatgctaggccaagaaatttggtctttatttcgaaggtggtagaaagccctaacttctcagcaagaatttttttttttattttaatgaaaaagaagaaaactgggtttcaggaaaattcatatggcaacaatgttgaagtcaaggaaaataacgaggttattgccatagttcaagtaagctaataaaacctgaatttcagta

SEQ ID NO: 1004 - DNA, 473 bp, Homo sapiens
gatagacatgagccatgacacccagctattttactttctttaaaaataaaaataataaatatgcacagttaaaatttcaaacagtactgaaaggtatgaaatgaagattttttctcaccaccatcatctccattcctccacaatcccacactccaaaagtaatagctcctaacagtgttttttcagtgcttactctgcagtgcttttgtgatctgcattggcatttaacacacaggatgttaaataaacaaaagagaagactctggtctcaaacccctggactcaagcaatcctcctgccttggcctcacgcctgtaatctcagcactttgggaggctgaggtaggtgaatcagttaaggccaggagttccagaccagcctggccaacatggtgaaaccctgtctctactaaaaaaaaatttttttaattagctgggtgtggtggtgtgtgcctgtaatcccagctattgtgg

SEQ ID NO: 1005 - DNA, 578 bp, Homo sapiens
  misc_feature 223: n = A,T,C or G
ggcaataatattgcaattttcattcaaataacctattaaagttagagccatgaaggggttactttggagacccagtgatagatattcacacctttttcaaaatgtgcccactttccccatatattttgcttgcaattccaggagttctcaggcctcctgaaacgtatttgtggatctcagcttgaaagctctgtatttgatgctgccttttttcttcccttanttctgtggctcctgatggatctgaaaagatggacgtggaggatgaaaatctgtctgattattttgaactgatgtttgttgctatggagatgctgcctatatgttgatgttgcagacgttaagtcactagcccacagccttgtattccatactcagagaccctgctacttacttgacatctcaacttgaaagtccaattaatatgcacttcaaactttaataggcttcaaacagaatttctttcattatctctgcaaaacagcttctctcatcatcttgaaattagtgaatggcattttactgttttagttggagtcatttctgtggttttctttcacatcctacataacaatcca

SEQ ID NO: 1006 - DNA, 533 bp, Homo sapiens
  misc_feature 408: n = A,T,C or G
ggaattgaatgcagcaaatttcatccaacagtggagagagggttaaagagaaaactaccaaggaggcttatatttagagcttgataggtttgttaaaatatcctgactttaccctttttatgtatctgtctttcacctaatgtgctttttgtgtgcacactattcaccaagctttgttcaaattgcaagggatacagaaaggactgagaaagtgactggtggatgagaaaaacaaaatatcttggttagatcagtacagctttccttccaagagtttgcatctattatctctacctctctgaaaaatcataacagaaataaaggcatatttttcctactattaagaaaacaaaggtagggctggcgcaatggctcaagcctgtaatctcaacactttgagaggctgangcgggtggatcatctgaggtcaggagttcaagaccagcctggccaacatggtgaaaccccatctgtactaaaaatacaaaaattagctggcatagtgctgggcacctgtaatcccagctactctg

SEQ ID NO: 1007 - DNA, 499 bp, Homo sapiens
atattctctcctgcatcctctcagcaccaatgctcagcagcccataggcagccctcagctacaaagaatgcccaggggatggagggaagagacgccagtaaattgaatttgctgtttaactcactgttagatctagaaaatatgggctttgtttttttcaattcttacaattactcaatgtgttttgaagattagaattttgcatctatgttatcaacccaaatatcatcactgattgtgatgctcaatgtggatgactataaacaggcccagcctcattctgttgtccaggctgtagtgcagtctgctcctctgcctcctgggctcaaacgatcctcccgcctcagccctccaagtagctaggaccacaggggcatgtcaccacacccagctaatttttgtatttttagtagagaaggagtttcaccatgttgcccaggctggtcttcacctcctgagctcaagtgatcacctgcctcggcctcccaaagtgctggga

SEQ ID NO: 1008 - DNA, 637 bp, Homo sapiens
attacaggtatgcaccaccacacctggccaatacttttatttaaatgctaaaaaacttaataacttaaatatttaaggtgtaaatactatttctcttctgagttacctaaagcatagctcatcaaataattgaaagcattaaaaacccttattgcatttctggaaaatagtagtttcttataaagatgtgcaccggggtgccatgtcacctaggttccaagtccagctccattttagatgacctacagcaagttaaataattgtcaatttttaaatctttcagattaaaagaatgcaaagaattcagtgtaagattcttcatcttttgttgtattatggcagtataatgccatttaaagtgctctgatgaaagactcccaggtttgaatgctggctctgacatttattagctctattacttaataagttacttaacctttctttccttcagtatcattatctacaaaacggagacaataatagtatattaaagttggtgtgatgactaaacgaacacaggtaaagttcttacaacaatgaactggcacatatatgaccaataaattcaaattatctctgataccacacagaattttaatggttgttctgaaattctcaactgtaattccaagtttca

SEQ ID NO: 1009 - DNA, 585 bp, Homo sapiens
  misc_feature 347, 365: n = A,T,C or G
ggatggaaaaatattttttaaggcacataataaaatagtactgaggtggggaaatattgaaacaaaaatgtgaaaacatcccaacagcacaaacacagagacagagagaaacatcaggaaatgtagacttccctgccaaccaaaattttacaaatagaaaggaaccactaaaacagatccggctcaaacacaaagcaaaactgaaaatttcactttacagcaaaactgctctgattagatctttcactggatttccttatccaactggctgatttagaatcgtgtgagaacacagcataactgcagagatactatctcgtcggcgggtggggactgctggcacgcangctgcatctggccctcantatatttcatctcacccacagaggactaccaagaggagataatgctgaatttcatgcttgcaatggcaaaaaagcattgcagtattaacatccttaacagtaatatggcaaaaggccacaagatggtgatggtataccctaaagagatctcaatcatatgtaaaatgaggtacacacacatacacactcacacatacactatacacttactaatttttct

SEQ ID NO: 1010 - DNA, 551 bp, Homo sapiens
gggggggaggagccaagaggccgaataggaacagctccggtctacagctcccagcgtgagcgacacataagacgggtgatttctgcatttccatctgagggaacaagaatacttggacacaattcaaagaacaccatcagatacctgaggtctagcttctggtcccaaatctgtcattcagaagtgtgtaacttgacaatttgttgaatctcactggattttatttctgtcaagagtaaaattaaccagataagaattatgctgagacatagcagtacctcaaaaagtggtggaggtaataagctgcaaagttggaacttgaatcccggacctcaagctccaaatccagaattcctcactttccccccgctacctgatacagaactggagaaaaataaatttgatttaattaagtgtagcagatcccaggaactattttatgtttaatgattactttcaagcttaatttgcctctatttaagtgtaactaacacataatctttaggataaacatgtcggaattctttctgaattatccccaaattttaagt

SEQ ID NO: 1011 - DNA, 440 bp, Homo sapiens
gctgtaggatgtgaagggctgattgaggtgatctgctcctgtgtgatgtgagtgttatacagaaggaaaacggtcaactcgttgcaacgtccaaggcacattagctgagctaattagtctatggttatgaaaaaaaagaaaaggaaagaaagaaggaaggaaggaagaaaagaaagaaagaaagagaaagaaaaaagaaaagaaagaggtcgagagaaggtaggcagaatatgttatgtaagttcttaaagtatccagatttcaattaatgactttgaccttcttaaattcctgttccaaaatcaaatggatgcatttctttttcttcctttctccatctctacacacaatggagtggggcacagtgaatgacaaaatcaccaaaaatgagctgtggaggggacagtcaaggtgaccagatagtccacaaactgcgtgtc

SEQ ID NO: 1012 - DNA, 520 bp, Homo sapiens
ggggacacacactagccagccactctctccaagcaaggggagggggacaaaaagcaattttgagatttgtacagtgcttgccaggtccttcaaaaatgactaccggccgcccatggctcttgcacagcgggtgggaggaagagtccttgtaatccacctctcccaaggaactcctgcgcgaggtttcagattccccgcctgcaggctatggctgacttccccgtatcctgtgtgacgtgggatgtgtggcttcccgcagcttcccgatggatgatccaacagacgtcatcttgcactgtagtgatagtcttgttgggaccacatgaagtgcagctgtaaaacagcccagcacctcacgctcaggaagggtgtttctgaagactgataaagccccttcagtgaatggcgccagggcacagctgtccacgacaaagtgaggatggccagataagaatagctccagtctgcagctcccagcatgatccacgcagaagatgggtgatttctgcatttccaactg

SEQ ID NO: 1013 - DNA, 579 bp, Homo sapiens
  misc_feature 98: n = A,T,C or G
acagcagctccaaattgtatgaagtgtgaagatagtattaaaaagtaggaacccagcagaacccctgtagtgaatgtggcagcagtgatggcacctangtacagtttctggaggcagcaatgatgacagtgcaggaaacaataccaccacccagcatatgtcatttcagaaatataagttgcaggaactgtacccataagcagtgcagcatccacattagtcaattccattcatatttgggtggttctcaagcacttcctgagattctgtaagctatccaacatcctttaaaaaagaatttttcttgtttgagtgatccataatggtgttctcttgcttataattaagaattttgatgatgtgaaaagcaatttggtgatatccattaaacttgaggatatgcataccctgcaactcagcatttccacagttacatgtacactttatggcagcattgtccaatagaagtttctataataatggctgtgccatccattgtgctagccactagccacatgtggctactgaacacttgaaatgtggctagtgggccgaccacggtggctcacacctataata

SEQ ID NO: 1014 - DNA, 562 bp, Homo sapiens
  misc_feature 369, 376: n = A,T,C or G
ccatcttctgcccttctggtggatttttctggtgcaagtgaggtcacagagaagggaggttttcagcctgacctgcttcccattctccagtcctgcgtgtgctgagaggtctctgtgtggtggcggtagcaggagcagtgcttcctgactcttatttccagcccctggattgcaggcacagctgtgagttttcagagtcaacagcggtggcagcctcagaggtggtggcagcttccctggtgggtcagttctgcggtgtcccaggtatcagcccctccagtcctcccaaccatttcctgagcacttagtgacctgtgttcaatccttcctgttggatatacacaagcacatggcaagtgcttggctcanagctcancatggagtaagtgctccataaattgttattgctataattcccacaagatcctgctctctatgagcccatggtctggttagagaggaaaagcgttcattaaaaaatagtctgattggccagaagtggtagcttatgcctgtaatctcaacactttgggaagccgaggctggtggactgcttgagccc

SEQ ID NO: 1015 - DNA, 445 bp, Homo sapiens
gggtatttttagtagagacggggtttcaccatattggccaagctggtctcgaactcctgacctcaggcgatccatctgtctcagcctcccaaagtgctgggattacaggtgtgagccaccgcgccaggcctcagcccacttcttttgggtggcaatggtttggatatcgtttgtcctcactaaaattcatgttgagattcgagccccagtgtggcaggtgttgggatgtggggcctcataggagctgtgtggtcttggaggtggagtcctcatggatagattaatgcctgccttaaggggtgagtgagtgctcacccttgggaatttgggaatttggttttctctcccttgcttccttcagcaccatgtgatctctgtgcacacagctgcatccttctgccctcccccagaagcagcagcagcctcagggatgaaggaggtcctc

SEQ ID NO: 1016 - DNA, 550 bp, Homo sapiens
ggcggattgctccaagggaagacgctgccatttgatgagctgcccacatgacagagaacaggccaatagccctcaaagaattgaaacctaccaaccaggggagtgagattggaagcatatattccttcgattaagagttcagatgagaagacagttcctgccaataccttgattgcaaccttatgagaaatcttgaggtggagacctagctaaaccatgcctagattcccgactcacagactgtgagataatatactaaaaatacatcactaatttagaataaaaatcaaacaagctgtcgaagaatgtgcacaaaagttgaaaaaatattacaccaaagatgatagacaaagcacggcaatccattctaagaaaagaggtatttgcaagggcaaatgagaacaaatggagccaaagcaataaattaagagaggaaaatttttgtaagctataaaaatgatctgagcttgtagtcaaaaggagtcaagatattgcatgcaacattgatgagtagagacccatgcttagaaatcatctgaaaaaaagtatt

SEQ ID NO: 1017 - DNA, 455 bp, Homo sapiens
gcgggaggctgaggcaggagaatcgtttgaacctggagggcagaggttgcagtgagccaagatcgcatcactgcactccagcttgggcaacaagagtgagactctatcttaaaaaaaaaaaaaaataggggaagggggacaaatgctgaataaggatagtcagccaggggaaacttcaggctaatctaccacacacaaaaggccaggttactaaaaccctttcagggggctttgatttgaagggtactattctttagggaaatccagcaatagtatgggaagtataaaaacctatgggggctggggggggggctcacacctgtaaccccaccactttgggaaactgagggggggggatcacttgagggcaggagtttgataccaccctggccaacatagggacaccccgtctctactaaaaatacaaaaattagctgggggggggggggcatgct

SEQ ID NO: 1018 - DNA, 533 bp, Homo sapiens
  misc_feature 479: n = A,T,C or G
cactttagggatagaagattgcaagtactttccaagtctactttctatgagccaagaccctatctattggaaaaataatttcaactgtaccagaagagcccagtgcccagaaaccaatatcagttctatacagatacaaggtgatgctgattatttcatcaaccatcttggagttcccatcgtgcagtttgcttacgaggacatcaaaacattagaggctgaataggccggacgcggtggctcatgcctgtcatctctgccctttgtgaggctgaggcgggaggatcaccggaggtcaggagatcgagaccaacctgaagaacatggtgaaaccccatctctactaaaaatacaaaaattagctgggcgtggtggcgagtgcctgtaatcccagctactcaggaggctgagatagaagaatcacttgaatcctgcaggcgaaggttgcagtgagccgagatggcgccactgcactccancctgggggacagcgtgagactctgtctctaaataaataaataaataaagcctga

SEQ ID NO: 1019 - DNA, 529 bp, Homo sapiens
ggtgacatctggttattacataatggtgatcctgagtagaagataaagactatatagcggctgggcacaatggctcatgcctgtagtcccagcactttgggaggctgaggcaggaggatcacttgaggtcaggagtttgagatcagtccgaataacatagtaagaccctgtttccacacaaagaaaaggtttttttaaaattagctgggcatggtggcgcatgcctgtagtccaaatactcagtaagctgaggcaggagtatcacttgagcccaggagttcaagaatagcctgggcaacatagtgagatcttgtctctaaaaaacaaaacaagaacatatagttacaaaccctccttttattatttttctttcaacttattgggaaaacaatatctatcatccagcttaaacaaccatcaatatttcactatacttgtttcatctaacactccctatgcctctcccccactttttcttggctagagtattttaaaataaatcccagacagtatatcttttcactcctcc

SEQ ID NO: 1020 - DNA, 516 bp, Homo sapiens
ggtacatctgcagcaaaccactgtggcacacatttacctgtgtaaccaaattgcatatcctgcacatgtaccccagaacttaaaaatcaacattaaaaaaaggattaacatttatatttccaaaagaaattcacgggagtgcttttttcctatctcggacagcaatagttcctatcactcttcttttaaattttgccactctgttggctaaaagtggtatctcattgttactttaatttgtaagcccctgatcaatactgaattcgaccatattatttgtatgcaaaccatttagtttttcttttctgttaattgcctatttccattctttgctcatttttcttttagatcttttgcctatttcttcacagtttgtaagaacctttttgtagtatacatattatgtcattgtcatttgttttacaattttccactcaatgatatgatttttctattaatattatattgttacaaagaacagataatgataacgaatgaataataagagtatttact

SEQ ID NO: 1021 - DNA, 490 bp, Homo sapiens
aaaactaaactgacaggacaatcaccaaccacagaaggagaaagagaacatgtaggatgaattgaaaccagctgatcatctgctgtaacaaaaacttcaacattctccagattttaacaggacccaatgtcttaaaacataatatgcaaaatgttcaggatataatccaaaattactcaacatacaaagaaccaagaaaagctgaccatttctctagggaaaagaaaatcaacagctacaaaccccaagatgaccagatattaaaactatcagacaaagattgtgaagtgagaagttcaagaagtccaaccaaccccaaacaggataaactcaaatgcccagacacatcataatgtcatggcaaattgcccaccatatagtcttaaatgaagaaaaacagaatataaaactatacataggatgaaatcaattgtgtctaaaatatgtagatgaaatacttatattacatataaacagaaaaattataaaa

SEQ ID NO: 1022 - DNA, 570 bp, Homo sapiens
  misc_feature 259, 316: n = A,T,C or G
agggcactgcattggtatacagataaacataatccaaatggattcaatgttatatgtgcattattattttattaatttttgtcctgatttaaaaagaaataaaaattagaacacatttgtgggcatctgtaagtattgtaggctctagacactatgcccttctgcctaattctgagtaagtcagccctgtaagtgaccatgccccttttaaggtatggcatgaaaaactatagaaattacaaaagggacttcaacctangtcaggcttgtgaggaaagccatcctggaggtctgcagtccaggcctaatgtcctanctaaaacctctggttgttctgcaagaatgtggaatgacataatcttttccttggtgagtaagcatctttcaacctcagagaggattaagtataggaatgtttaccagaaatttcacctatacttgaatattttggggttaaagaaactgtacatgtttgatatggaaacatttaagagaatttggccgattagagtaatactttagctttgtaattcttaagtgtgtaattgagcaattgatttagctcatgat

SEQ ID NO: 1023 - DNA, 591 bp, Homo sapiens
ggaaacgtatatttttatatatttcatttcacttggctaaatacctatgatacctataaccttgccaacttttttatacagttaaacatatacttaaccgccttccctaagagtggatataagagtctgtagagtgttccccagtctgggtttgtctgacgtttctctcacgaccagcctgggtgtggtgggttttggaaggaatacgtggggcgcatgacagccaggtaggaccacgagcttctccactgcagagttactgttgatctccttccctgctcttctttgaaagcaagtcacgaagtccagcccacccaaacagaggagagaaaaaccgaggttcgttttctctacacagatattcatttctccagcaccatttgttgaaaagatgatcttttctcccactgaattaccatgacacctttgtggaaaatcgatgggccatgtatgtgtgagtctttttctggactccagatcctgtcgtgtgaatttacatgtcttaaaacaacagcacaccatcttgactaccgtagataaatagtaggtcttgaaatcaggtactctaagttatctctggtttcttttttc

SEQ ID NO: 1024 - DNA, 558 bp, Homo sapiens
gtgtatgacctataaagataaaatttttactctctgctcctttacaagaaaagtttgatgacccctaggctaacaagacaaaggaaacaatgttaaagaagtgcatggacaataatcacctggcagaagctagaaccacagtggacccgtcccgaaccgagagccatgaagacactcagccactgctactcacagaaagaccattcaagacagatagagggggacaaatacctggcttctttcttctttgtgccctccaatctccctctccggtgcctcccacacaccaacccagctgacacaaaaccctgaaacacacagctttgggtgtccgccttctgtatacaaagcagatcagcagaaaggcgagaactggatctgagagtaaaccaaaccaagaactgccaaataccttacagaaaccctcacatgtctggactaggagacatagaaagaatcttctagcagcattgttagtaacagaaaacaaacgaacaaacaaaaaacagaaacaaccagctaggtgtggtggctcatgcctataatcccagcactgtg

SEQ ID NO: 1025 - DNA, 517 bp, Homo sapiens
gggccctttcctccttccaccatgtgagaatgcagcaagaaggtgccctgtatgaagcagagggccctcaccaggcaccgaatccggtggcaccttgatgttgaacttctcggccttcagaactgtgacacagagaatgagtggaatactaatacattgaagggcaaaatcaaaaccccagaagatctctaaaagtctgaatgaatcagcccatattacaagataaagtccataatggtaaacggaaggctctggtcttggtttacaaaatccaaccactcaaatatgtagttgctggaagttttgtggccatggggatgctgacaaagattgcttgggatgcacacaaggcagcggcgaagcctgaggggtgctgccaggccgggctctccactggccacgaatttgtacatatggctttggaaacctcatccaacactaagtaatgaacatacatgaggatactatgtatttttcaacctgcaagcccaagatttcaaattctttggtttatcgc

SEQ ID NO: 1026 - DNA, 471 bp, Homo sapiens
  misc_feature 176: n = A,T,C or G
ggtacacatagccactatcagatacctccactatcagatctggatatttttaaagtttccatttttattgcatttaaaattgtaagatcttactttcgttagggctagtcatagctcaactgagggttgacagcccactgtctcagccctgcactggctttgggctcatgacttanaacaagttttttttatatctttttttttccagacacattgtctcactccgtcacccaggcttgagtatagtggcatgatcatagctcactgcaacctctaactcctggactcaagcaatcctcccacctcaatctcccaagtagctaggacaacaggtgcacaccatcacacccagctaatttttttattttttgtagagacaggatctcgctatgttgctcaggatggtcttgaactcctggcttcaagcaatcctcctaccttatgcctgtaatcccaacactttggaggctg

SEQ ID NO: 1027 - DNA, 392 bp, Homo sapiens
acagagggagggttccgatttcttacatccttgccaagatttgttgttttcctttcttttttttttttttttttttttgaaaacaaagcccaccggggtgccccaggcgggagggcaggggaatctttgctaatggaacccttggcctctggggtcaaagggattccaagccctaaccccccggggggggggggtttccgggcccccccccccacccccggtaaattttggttttttaagaaaaaaagagtttccccctggtgggccaaaggggcccaaacccccgaccctaaggggaccccccccccggggtttccaaaagggggggaataaagggggggacccccggccccggcccaaaaaacccttttttttttttttttaaaaaaaaa

SEQ ID NO: 1028 - DNA, 576 bp, Homo sapiens
gttagtaaaagaaaataaatgtaagtgtttgccctttaagtgatacacccaaaataatacagtgcaaaagggtggataaaggacatggtaaaaatatgccatggaaaagttagtataagcaatacacactggtataccaatataattatcggataaaatataatatgaggcagaaagcaatccatgggggaaactggtataaaaggcaaaattcaatatactagtctttaatttttattctatgtgctctacgtgcttattgaaaataattaaacattccactttagtattctataagacttccacttgaaatctgtagcgatatagtggttattcaaacactagtgctagaaatactggttattctagttggctatgaaacattccatattgttttctatagcagctgcatccgtttatattccaaacaatagtgtacaatagctctaatggcttcacattcttattacttgttatctttgtagatagatagatagatagatagatagatagatagatagatagacataataaccaccttcacaagtgagagatgatatctaattgcagttttga

SEQ ID NO: 1029 - DNA, 588 bp, Homo sapiens
ggcctgcctcagcctcccgagtagctgggattacaggtgcccaccactgtgcccatctaatttttgtatttttggtagagagtgggtttcaccacgttggccaggctggtctcaaactccggacctcaagtgattcaccccacctcagtctcccaaagtgctgcaattacaggcatgaggtaccgggcccagcctgtccttttatatttagagagcattctattctagtgatatgtgatttctcttgcgtggcctgatttccacgcactgcaggccctagccttgagttatttgtacaagcaggatgatttattgtcccagctcctcatcatcctggcagtggagtatgcaaaatgagaaagactccaagcaggtagatgtcagactattcagagatactaagagtccctagaggctgacacacacacacgaggacaaacttactaagggcagcttctaagtgtatccttcctagcagatcacatctttctgtttgaatttgagtatagtatattattttaggtacatcttccaatatggttgcttataagtaatatatgtaaattagccgggcgtggtggctcgcga

SEQ ID NO: 1030 - DNA, 520 bp, Homo sapiens
ggtagctttgtcattttaattttaatctatttggaccctgtgttatctgggatgaggtagagtgatatttttattttctcaggtaattatttgcctaatgcctgtttccaaataatccaccatttccttacaatttaaaaatgctccagcatgtttttaatagctacacatatttgacacattttctggagaatttctgttttatttgtctatttcattattcttgtatcattatcatattatctcagtagctttgtggcaagtattaagatctactatgccaaatgtctattcactgtaccatttttcagaaaattctttttcaatcatctcatatttattcactcctgtagaatttaaaatcaacttatctagcccaacattaaacctcacaccctagaacaacaacatgtcgtagtaattctgactaaaattgctggaaatttatagatgaatttagggtgtattggcctctttatgatagaagctttttattcatcaatgtatgtttctccattta

SEQ ID NO: 1031 - DNA, 223 bp, Homo sapiens
aggaatgtgacattaagctgggtcttaaaatatgaatacgtgctagctaggtagagaagaaggcataggcattttaggtatctagagagtattgtgattgtggcctgcgagtagggtagtacacattctgttagggaaagagtagttagcctctgacatctggcaagtaccatgtgtggctggggctcgcaaactatgaggctggaggagtatgtctggagtg

SEQ ID NO: 1032 - DNA, 618 bp, Homo sapiens
ggcctacggctgcgagaagagacagaagggcaagtccgacttggacattaattattggcattaatattctaaaatctgaatccccaggccgggcacggtggctcaccctcccaaagtgctggggttacaggtgtgagccaccgcacccagcctgtggttctcaatgtttagtgcacatcagattgacctaaagagtttattaacacattgctgggccccacctccagtatttctgattcaggaggtctgcattggagcctgagaattggcatttctaacaagttcccagataatgctgatgttgctgctctggggaccgtgcttttggaactgccagtacggtatacggcagcagtccccaacccttttggcaccagggcccagtttcatggaagacaatttttccgtggatcagggaggtagtgggggatggtttcgggatgaaaggattccacctcagatcatgaggcattagttagattctcataaggggcacataagctagaacccttgcatgtgtagttcaatagggtttgcgctcctatgagaatctaatgccaccgctgatctgacaggaggcggagctcaagccataatgctcatttggccttctggcct

SEQ ID NO: 1033 - DNA, 462 bp, Homo sapiens
cctcccacctcggcctcccaaatgctgggattacaggcatgagccactgcgcctggcccacttttaacaacaacaacaacaacaacaacaacaacaaacaacaacaacaaaaactttatgtaaaatttgataggtaatacgttccagcaattctttctttgaaatagtcgtaggaatgctctttttatcctagagttttagattaggttctataatctagactagttcttcatcaagatatgtatatagtgtatattgatgtctacaaaattctattttcttctccacgaatcttcgttattaatagtaaaattatgccctcatttacatctgaatttaactgaggtttaactcttgctatattcccgtctaggaaatggcttacaatttcttgacttacaagaatacaaaatcttaatgtattctggtttgagcttgtatacatgctgatttccccttctg

SEQ ID NO: 1034 - DNA, 627 bp, Homo sapiens
ttggccgagcggcctacggctgcgagaagagacagaggggatcgcgccactgcactccagcctggcaacagagcaagactctgtctcaaaaaaagaaaggaaagaacagtgaagttctctgcccttgtatgattccatgataattacaagtgtgtctatccccaaagtttctatgttaatacctctctacttccagttcttagaagggaagaatgaaacaggaaaacttcggctgcttctacttatccagtttataatcttagattttggcatttgggtcaagtttattgcgtctgtcctctattttcctgccataatcactcagaatttcatgatgtttttcctacttcaaagaatatatttcctcccatttaaattaagtattttgttcaatcaacgaacacaggttctttaatattacagtgctagttactatggttaagatttaatactggccagatgcggtggctcacacctgtaatcccagcactttgggaggccgaggcgggtggatcacctgaggtcggaagttccagaccagcctgaccaacatggagaaaccctgtctctactaaaaatacaaaattagccgagcgtggtggcgcatgcctgtaatcccagctactc

SEQ ID NO: 1035 - DNA, 574 bp, Homo sapiens
ggtgttcacgagctcctggagccacaggccccccaggaacaacagagctgagactgggtggccttgtttctggcccaattccctgggaccaccaccctggaaggacacttgagccctactcaaggacccaccacaacatctcagcattgtcggtccttaaatgccaaggtctgtgctcaccatttccatccttaagattctcacagggaagaacccacacaacagctttgtccctgcgactctgggtgagtttctgacactggcctgggctcccgttttgcccgtcaccaacttctcacagtataactatccaagagaagtagcatttgatgtcagggaatcaaaagggctaaggctcgggaggccaaggcaggtgaatcacttgtaatcaggagttcgagaccaccctgaccaacatagtgaaaccccatctctactaacaatacaaaaaattaaccaggtgtggtggcaggtgcctgtaatcccagctactcaggaggctgaggtaggaggatcacttgaacccaggaggcagaggttgtggtacgccaagatcatgacactgcactccagc

SEQ ID NO: 1036 - DNA, 573 bp, Homo sapiens
acagaaggggtagtcactttagggatagaagattgcaagtactttccaagtctactttctatgagccaagaccctatctattgaaaaataatttcaactgtaccagaagagcccagtgcccagaaaccaatatcagttctatacagatacaaggtgatgctgattatttcatcaaccatcttggagttcccatcgtgcagtttgcttacgaggacatcaaaacattagaggctgaataggccggacgcggtggctcatgcctgtcatctctgccctttgtgaggctgaggcgggaggatcaccggaggtcaggagatcgagaccaacctgaagaacatggtgaaaccccatctctactaaaaatacaaaaattagctaggcgtggtggcgagtgcctgtaatcccagctactcaggaggctgagatagaagaatcacttgaatcctgcaggcgaaggttgcagtgagccgagatggcgccactgcactccagcctgggggacagcgtgagactctgtctctaaataaataaataaataaagcctgaatacaagacaattggaaaaaaaaaaaa

SEQ ID NO: 1037 - DNA, 654 bp, Homo sapiens
gccctacttttatttatacctatcttgccaatgagaggccaagtcaatttttcaaggttacagagctattaagtggtagcactggaactctaacccagataatcttgctcaaaaattgtttttctaaacactaatctaagctgcctctcacatgcaactaggagggcctattgctatagaaaatatatttaaaaatggatacctgttgtagggatgatgtcagtcttgagatacttagagaacatcctcttggtaggtagcttgctggacgtgagtcttaagtttaagaaagatggctgggttaaagatacagatttaggagttgccaatctatgggattagggaaggtcgaacaagtaggtgagctcacttagtggttcccaaacactaatccacaggccatttcggatccatattgaagtttataacaactctttgcaaagcagatcaataaggattgttgaggagtttagtgcctaaattctcttttccccttatgtaattacagtgaatagagaatacacacaaaatatagtcattggaacttagctaagacctaaagtcaaatgggctctattactcactctgtacacctaaaacatacaatctgtcaaaggaaatagctgtctacacaggagaccctgtcttacctac

SEQ ID NO: 1038 - DNA, 452 bp, Homo sapiens
acagaggggggtgctggtgcggcgggggactgcggggccagcctcaggtagcagcagcagcagcagcagcagcagcagcagcagcagcagcagcagcagtaatgtttcacttcttcagaaagcctccggaatctaaaaagccctcagtaccagagacagaagcagatggattcgtccttttagtggcgtgatctcggctcactgcaacctccgcctcctgggttcaaacgattctcctgcctcagcctcctgagtagctgggactacaggggcctgccaccacgcccagctaatttttttttttttgtattttcagaaaagacggggtttcaccatgttggccaggatggtcttgatctcttgacatcatgatccgcccgcctcggcctcccaaagtcctgggattacaggcgtgagccaccgtgcccggcctatatgttttattttataaa

SEQ ID NO: 1039 - DNA, 478 bp, Homo sapiens
gggtggaggatgtccaccaactacacttttgccaataggttctcttgcaggaagatttgagcagcatatgcccatggtcattagagtgtgacactggagaagttttatcatctctctgaactgcatttgcaaaatggagttaatgtcatttttgttaccaggttttgagaggactaaataagataagtaaaaagtatctggtatagtatgtggacttaatattagtagctgactgtaattctttttccgttaacacatatgagcaaactgtggctcagagacagaaaactaccttcctgaaggccacatggctagtaagtgccaggtacaagattaaaatccagcttaacccaatgtcctacatatattatattcaggcacatacttatctaaaaatctatgcccaatttttggaactagggactgcatgaacactctatattctataaagctgttcatggagaaacatctgccagcc

SEQ ID NO: 1040 - DNA, 593 bp, Homo sapiens
tacggctgcgagaagagacagaggggagttacttgatccacttccttacctcctgttcatgcaactttgcttgttttgcttctactaaaatggttctaggtgctgtgtggacaggtgatacaaaagcctgactcacacggttgacattcattcattccattttcatttctctttgagtgatcctgacaagcagagggtctcaggtggatattactgtgtctttgagacctctctaatccttatctatctctcattttaatacagagagtttcatacgcagaccttaagtagacatagtatccagctaaaagggtctcactctgtcacccaggctggagtgcagtggcgcagtcatggctccctgtaacctcaacctctcagactccagcaatcctcctgcgacagcgaagttaatcttctggttcggttcacaaagtgcaggagagcctaccagcttgagagaaaaggagtcatgctgtatttgtttccttgagtgaatggccactcagctgctgtgtttctccctgcatgtggctgaagttacattggagggtgacttcctgattgccagttagcatatgtgtccggctacc

SEQ ID NO: 1041 - DNA, 511 bp, Homo sapiens
acagagggtcgagaaaagcctcaggaacatggcaaaaccctctctctacaaaaaataaaaaataattaaccaggcatggcagtgttgcctgtagtctcaactactcaggaggctgaggtgggaggattgcttgagcccaggaggttgaggctgtagtgagctaagatcatgtcactacactccagcctcggcgacagacagagtaagaccctgtctcaaatttaaaaataaaaaaaaagaaaagaagaaaaatctcaaatcaataagtttccacctgaacaaactagaacaaaagagcaaaaataagacaaagcaagtaggaaagaaaaataataaagataatagcagaagttgaaaaagtaaaaacaatagacgatactctatattgctaacaatagagtatatactatagtgtacagtttattgttatatatatctgtatctatattctatatatacactatatttttatacatggacataaaattgaataaataaagttgcctctagc

SEQ ID NO: 1042 - DNA, 120 bp, Homo sapiens
cctacggctgcgagaagagacagaggggttgcgggagggtgctttaacaggatccaaagcagggcaattgggctgctttcaggaggaggtgacaactgagctgggttttgaaggatgcat

SEQ ID NO: 1043 - DNA, 448 bp, Homo sapiens
ggaagtgattggatcatgggagtggatttcccccttgctattcttgtgatagtgagttctcacgagatgtagtttaaaagtgtgcagcacttcccccttcagtctcttcctcctgctcctgttatgtaagacagcgtgctggcttcccctccttctgccatgattgtaagtttcctgaggcatccccaaacatgcttcctatacagcctgtggaactgtgagtcaattaagcctcttttcttcacaaattacccagtctcaggtgtgtcttcatagcagtgtgagaacagactaatacagacatgatctctagtgagagtgtgagaggccacagaaggcaataagtgatagcagtgatggttttcagtagcatgatgatagaagctgattaaggaagattcccagctacctcagtacacagtgccttgttgagttaaagaaatggggc

SEQ ID NO: 1044 - DNA, 581 bp, Homo sapiens
acagagggggaatagcatctttcaaaaattctgaaaagctcccagcttttagcacttcaaataatgttcttccttacattctctattataccctctagacctcctagtaaacattagttgaaccttcttattcaatcctcaacatctcctaacctctctcacatattttacatgtctattgcattctataaaattttcttggcttgttcattaatctctttaactttgtataatttactatttagttcattatacaactcaactatttattcaacttagccatttattgattaaacaaaataattaaattttaattattatgagcttttattttaagattctgtattatcttttaaaatccacttgatcatttttatattctcttttcttgcttataatttcaaaccattacttgttttttaaacctattaaataccctttttatatctctaataatttcagtaacttaagactttgtggatataattatgctatcaattttattttctgcatctgactcatggtatcgtgtttccgtgtgtgttttaggatttcttaaaatctcgtattcctatggccgg

SEQ ID NO: 1045 - DNA, 565 bp, Homo sapiens
ggcctacggctgcgagagacgacgaggggggggcttgaagaatggattaatcttctgagctgttctcttaagagaatcctgggtgccttcaactttctcaatttctccttcctgctggctagaatgaggacgatggaaagttggacaggaacaagataggttaaacacttacaaatcaactcatcaacaagtcacagaaggcataattttaattctgaaagagaatataaatcctatgagccctggcaatgtccacattgaaatttatgacaatagtttgggaggtggaagcagagaaagagacctgatgggcgtgtgggaaccctactattaaatagcacagagggaagaggaaccgttttaaggtgaaagactacagaataaagttttgagaatattatttaaagtcctgatggtaaccgatagaaaacctagaaataagattgtatctgactaaatatgggacaagtcaggaggagtgtagagtaatattgtgtgactgagcacaatccccacgtttggtagcccctgagatggactcccgtgatccctgacccgagctatt

SEQ ID NO: 1046 - DNA, 634 bp, Homo sapiens
  misc_feature 507: n = A,T,C or G
gtatatatgcagaaaatattcattatagcatggtttctaattataaaaaattgcaaacaacttacatgttcatatgtaggagagcaactacataagctatggcaaatccacatggagtactgtacatctgttaagaaagaataaggaagatctgtacagactgatatggtatcattttcagaacacactgtcaaataaaaaaagcaaagctcaaaagaaaaatataatattctactctttatgtaagaaataaggggatctaaaaaatacacagatgtctgcttatttgtgtgaaggaaatacaggtaggatatatcagaaaccagataaattaattacacatggccgggcgtggtggctcacccctgtaatcccagcactttgggaggccgaggcgggcggatcacgaagtcaggagattgagaccacggtgaaaccccgtctctactaaaagtacaaaagattagccgggcacggtggtgggctcctgtagtcccagctactcangaggctgaggcaggagaatggagtgaacccgggaggcggagcctgcagtgagccgagatcgcgtcactgcactccagctgggcgacagagcaagactccgtctcgaaaaaaaaaaaaaaaaaaaaaa

SEQ ID NO: 1047 - DNA, 564 bp, Homo sapiens
ggcaacccgctcgggtccccttcccactgtggaagctttgttcttttgctctttgcaataaatcttgctgctgctcactctttgggtccacactgcttttatgagctgtaacactcaccacaaaagtctgcagcttcagtcctgaagccagcgagaccacgagcccaccaggaagaacaaacaaactccagacacgccaccttaagagctgtgacactcaccacgagggtccgcggcttcattcttgaagtcagtgagaccgagaacccaccaattccggacacactgggattacaggtgtgagccactgcgcccagccaagcatgccattctttagaagatgttctctcctggcacatctcagtttctacaaaggcccccagcccttcctggagacccctggggcgaagttctctcacccttcttcacatgcccataacaactcacctccctctctcttagagcccccgtcctgcccttccttgaattctggtcatgctcatgtttgccatagctccccaaggaagacagcctctgagtcaggtctgacattgtctgtcctca

SEQ ID NO: 1048 - DNA, 551 bp, Homo sapiens
tgcttgttgttttggccgagcggcctacggctgcgagaagagacagaagggaaggaaggtttggttactgttaatgaatcagttggaaatatttaactctctgctttaaggaagttcaacttggagatatgtttcagcagatttgaagaattgactttgagcccatttcctggttagcaaatgtgtctttggtgtttcttgctaccagcttcgtcatagaattctataattagatttctgccacacttgggttgatatctgcataattttgttatatctctgttgtgtactttatgtggccgactgcagctgtactttgttgccaaggaaaatgaacagataatttggattaaagcagaatgcttaatttttttttttttttttggaaacacactttttgctctgttgcccaggctggagtgcaggggtacaatcttggctcactgaaacctctgcctcctgggttcaagcagttctcctgcctcagccttccgagtagctgggattacaggcatttgccaccacgtccggctaattttttatatattttt

SEQ ID NO: 1049 - DNA, 538 bp, Homo sapiens
attccagcttcttgtttttttgtttttttgttttgttttttttttttttttaaaaataaagttgccatcttaatttcatttttgtagggttgattgctagggaataaaaataaattttggggccaggggcaggggctcacccctgtaatctcagcattttaggaagccaaaggggacatatcatctgaggtcaggagttcaaaaccaccctgactgacatggaaaaatccagtctccactaaaaatacaaaattaccccggcatggggggacatgtctgaatcccagctactcagggggctgaggcaggggaatcacttgaacccaaaaggctgaggcaggaaaatcgctcaaacccaggaaacggaggttggggtgacccaaaatcgtgccattgcattccagcctgggcaacaagagcaaaacgccttcaaaaagaaaaaacaaaaagttttttttgggtggatattctgccttgttatttttcttaattggttccctaaatttcataatttctaaatggttccttatggttttct

SEQ ID NO: 1050 - DNA, 511 bp, Homo sapiens
cgacagaagggatcattggctaccctcctcccctttacagtcacaagtccagatgtttggagggggagggagaagctggactctatgaaagacaatttagcagttttgcagtgttggtgtttctgaccttccatctacttccccatctgtctgccaaggtccgagtgtccctctgggtatgcacgaggccagactgtttggacctggtcattcttcaagcctaagacgggctgccctgggatagaaaggttataaattccgggctgttgactccaaggcaccaaatattgtcacaggaggaaacttttttgcagctgctgtagaaaatgtaaacgtggctgggcacggtggctcacgcctgtaaccccagcactttgggaggctgaggcaggcagatcacctgaggtcaggagttcaagaccagcctggccaacatggcgaaaccccatccctactaaaaatacaaaaattagctgggcttggtgacacgtgcctgtaattccagctactc

SEQ ID NO: 1051 - DNA, 267 bp, Homo sapiens
gccaggctaatttttttttattttagtagattaggggttttgccatgttggtcaggctgggcttacactaaaccggggttgtttttttaatttttaggagaaaggggggttctaacctttggccccgggggaatccccctcccccaccctccaaaggggggggatttccgggtgtggcccccccccccccggggaaaaatttttttgggtaaaatcttccttgttttggggggaaaaattttttttttttttttaaaggttttcgct

SEQ ID NO: 1052 - DNA, 524 bp, Homo sapiens
tcactctagcctacacagtgtcctacactccagggaactggcagtgccattcactagggaggctgcccccagaacaaagggagctgaagcaggcactcttctcaagtggagagtcaccttcccaggaccactgacactgacagcaatcctgacccccaggagcagggccactgcacacctgcaggcatcctcaggggacctggggactcacctgcctgggcactattccagggccagagcacaggcccatcccacccattgctgtcactaccactacccaaggtcgttgtccaggacgctggggatcaacccacactgctctctgtcattggcacctgtgcatgccttcttgtgacctgagtatgagcccacccagcctggtggtgcctgtgcacattgtctgggagctgggggattaatccaccatgcctatcaccatcaagtacctgtgtgtctcctgagagcctaaggataggacttcccatcctgccatcacggctgtcaccagtgcccacatatttgca

SEQ ID NO: 1053 - DNA, 623 bp, Homo sapiens
gcacagcatggatataatgcctagaaagtttacaatgaaaatctagttcgtatgattgaacactcacagaaagaacttcagaagactccagtgacccttcatgagaagaacatgtctgcggtagccactggtccaaggagaatgaggaaatatgtagagcagctttgaacctaatcagcagtctgaagtcaagcccagtggattccagccaagcacagcagaaccacagccaatctatagaactatgagagaggaaataaatatttgtggctataagctattgagagtttaaacttgattgataggcagcaaaaactttcaaatcaattgttcttattaaacattttgcttttgttttgttttgtttttgagacggagtgtcactctcctccaggctggagtgcagtggtgcaatctcagctcactgcaacctccacctcccaggttcaagcaattctcctgcctcagcctccggaatagctgggattacaggcgcctgctaccacgcctggctaatttttgtatttttagtagagatggggtttcaccatgttggccaggatggtcatgaactcctgatctcaagtgatctgcctgccttggcatctcaacgtgctgggatt

SEQ ID NO: 1054 - DNA, 660 bp, Homo sapiens
ttgttggataaatttaatgaaaattatgaatgagatttagcaatgaatgttttaagtaacccccattcctagtactgtctttcatacatggtgggcctttcttgagggaaatttagcagtataatcaaagcctttaaaatgagcatgtattttatctggtatttcttcatgtagacatttattccaagaaagaaatcaaagatgtgtgcaaagagaagtcttagccagaacaatcaggcaagagaaaaaaagggcattcaaattggaaagaaggaagtcaaactatctgtttgcccaccatgtgatcttataccttgaaaaccctagagactccttcaaaagactcctagatttgataaatgaattcagtatactctcaggttacaaaatcagtatacacaaatcaatagcactgctatacaccaacaacaaccaagctgagaattaaatcaagaactcaatcccttttacaatagctacaaaaaataaaataccaaagaatatacgtaaccaaggtcgagaaagatctctacaaggagaactacagaacactgctgaaagaaatcatagatgacacaaacaaatggaaatacatccaaagcaatcctaagcaaaatgaacaaatctagaagaatcatattacctgacttcaaattatat

SEQ ID NO: 1055 - DNA, 339 bp, Homo sapiens
catggcagtttctcttatttcactgctttcccttggttttctcatctgtaagaaatgggcataaagtgcagacataacagggtctttaaggataatttattaaataattaagttaaataatatattgtatataaaatttatggtgtaaagactatttttgaaaactggatataattcatatttaacatacacaaactaaatgagaatttggaactatagtacccctgttggcaatgattcaagtgaagcattttgaaattcagacaattttcttttttttttttttggctttcttccctatttaaaggactgtggaattataaaggatactttaatttt

SEQ ID NO: 1056 - DNA, 537 bp, Homo sapiens
acagaaggggggcaacctgatggggtcccttttcaagctgtggaacctttgttctttctctgtttgcaataaatcttgccactgctcactctttgggtccacactgcttttatgagctgtaacactcaccgcgaaggtccgcagcttcactcctgaagccagcgagaccacgagcctactgggaggaacgaacaactcccgacgcgccgccttaagagctgtaacactcaccgcgaaggtctgcagcttcactcctgagccagcgagaccacgaacctaccagaaggaaaaaactccgaacacatctgaacatcagaagcaacaaactccggacacgccgcctttaagaactgtaacactcactgcgagggtccgcggcttcattcttgaagtgagtgagaccaagaacccaccagttctggacacaatttcaagtcctcagggtgagttttccccagctgagtgagaatataaattagtcacaggagtaccctgaatcactgtttggttggactagtttttctaggtgaacactgt

SEQ ID NO: 1057 - DNA, 588 bp, Homo sapiens
cgacagaagggataattggggagttcttaaaacagcctttaaggtactcttatatctccttgttttgggggccgctttcttaggcttggatgcctccggcttgggaactttcttggccacctttgaccaaccaaccttctccagcagcctccaccagcaaaagcttttggggtccgcttagtactctttttcggaataaggacgccccaagctttcttgggcctctcggctgccaggacagctgtcttgggcatgactgcagcggcttttctggcctcggtcttgattttcctaacaccgcctggtttggcgggaatgaacctgtggcgctgcactccttagcacgaagatgccctcgtttgttttcaaggcccaacttcattcaaataatttttaaaaatttgtatttatttttagggacgaggtctcactgtgttacccaggctggcctcaaaactcctcagcttggccaggcgaggtggctcaggcctgtaatcacagcactttaggatgccaaggcgggcggatcacgtgatgccaagagttcgagaccagcctgcccaacacattgaaacttcgtctctactg

SEQ ID NO: 1058 - DNA, 615 bp, Homo sapiens
cttgttcttttggccgagcggcctacggctgcgagaagacgacgagggagcctctccctgtgtgtctttttcttcacgtgacattttccttctcttgtaaggacataagtcatattagactagggctcaccctaattacctttccttaacttgattacatcagcaaagaccttatttccaaataacttcaaattcacaggtacctggggtgaagacttcaatatatctttgggaggacataattcaatccataaaacaactcgtttttaaatgaataacggccgcttaattctgtttatagatgctgaggaattgtgtgactattcctagtgaggccgtatgaaactcagccagcagatggtctacgatccggaggtggtgtccatgatttttttcatgtgttttgtgatctaacaaactcaggtgcttcatctaacagctggggtattcctaaataggattgagattataaccaaattattaaaagtaaaactatgggtcaggcatggtggctcatgcctgcaatcccagcactttgggaggccgaggcaggtggattgcctgaggtcaggagttcgagaccagcctggccaacatggaggaaccctgtctcta

SEQ ID NO: 1059 - DNA, 620 bp, Homo sapiens
ggggcttttcagcatggactccacagactgtcttcagttaaaaggaaacccccaggtttcctgcaacctcactgggcattttcagaatgatctgtacaagcgttgactgaatgattgattccaagttcccccttcctaggatttcagacctcctcttgacaagtgatgaatgggccatcttaatcttgtttggatcagaaaggaccatacaactgagctttagacaagactaaaaataccaaaagtagcagtctgcaattttatgtgcatgtggcttgaagctctgacaacaacacaaaagattcccaaatgtggtactcattctacctggatataccagaggattttgtgggaataaaaggatgactgttttttcacttgaataattagatggagtctagctccgtcgtctaggctggagtgcagtggcgtgatctcagcttactgcaacctccgcctcccgggttcgagtgattctcctgcctcagcctcctgagtagctgggattacaggcacccaccactacacctggctaatttattgtattttcagtagagacagggtttcaccatgttggccgggctggtcttgaactcttgacgttgtgattcacccacctc

SEQ ID NO: 1060 - DNA, 549 bp, Homo sapiens
tgcttgttcttttggccgagcggcctacggctgcgagagacgacgaggggctgccttatcccaggtatccccagaacctgaacctcggctgagactgggaaggacgtggtgcctgggggaggtctgttaaacaacagaaagagtgacctttggtgagtgtctggcacaattttctacactgcctggctccagattcaccaccgtggcagagccaactcctcagtgtaagccccaaggcccccgcacttggctcaccacctggcgagtggcagcgccatggtgacctcagagtcttcccatgatgaatggttcccactcagtcaaaggcacttacaacctgcctcaaacacatgaacactgattgaatccttgttttaaaaaattaggataggccaggcacgatggctcatgcctgtaatcccagcactttgggaggcttgagttcaggagttcgagaccagcctgggcaacatggtgaaactccgtctctaccaaaaatataaaaaattagctgggcgttgtggcatgcgcctgtagttccaactactc

SEQ ID NO: 1061 - DNA, 395 bp, Homo sapiens
ggcctacggctgcgagagtcgacagagggaaggaaggtttggttactgttaatgaatcaagttggaaatatttaactctctgctttaaggaagttcaacttggagatatgtttcagcagatttgaagaattgactttgagcccatttcctggttagcaaatgtgtctttggtgtttcttgctaccagcttcgtcatagaattctataattagatttctgccacacttgggttgatatctgcataattttgttatatctctgttgtgtactttatgtggccgactgcagctgtactttgttgccaaggaaaatgaacagataatttggattaaagcagaatgcttaatttttttttttttttttggagacacactttttgctctgttgcccaggct

SEQ ID NO: 1062 - DNA, 417 bp, Homo sapiens
ctcacacctgtaatcccagcactttgggaggccgaggagggtggatcacctgaggtcaggagttcgagaccagcgtggccaacatgatgaaaccctgtctctcctaaaaatacaaaaattagctaggcgtggtggtgagccgctgtaatcccacctactgaggaggctgaggcaggagaattgcttgaacccaggaggcggaggttgcagtgagctgagatcgcaccactgcactccagcctgagcaacaagagcaaaactccatcacacacacacacacacacacacacacacacacacacacaattttatggcatatattatccgaccacaacggaaatgaattgaaaatcaacaaaaataaaacagctagaatagttagaacatactggccgggcacgggggctcatgcctgta

SEQ ID NO: 1063 - DNA, 696 bp, Homo sapiens
ggcctacggctgcgagaagagacagaggggaacttccttatccatgtcttaataaaactgatacgcctgtaatgtgaaaataattcttcattttttatccacatgaatgaagtaattagcttatttggttttatagatatatagtaatatataaatttgtgtggttttggaagataactttatttccttgagacaaggtatatctttgcttatttctctttagttgagaagaagtgctaaatctgaattgtagtaggaatctgcagttcttccagtatggacagtgcttcattttgatacatttacatgatggagtgttataaaattgcatgtaataatgtttacaaagttgataataactcagaaaatgtcttataatgttgatttttaagaaatgtaatgtatgtaatgtatgatcacaattacttttaaaaggaagtaaaaataaaaattaaaaacagaaaaaaaggagaaattatgccaaaatgttacttttcttggggacaaagagtatattaaacatttttgctagtttaatattttctatatttttcataagtacatatatcactgtagttagactacataaacaaaataaaatttatttttaaagaattgcatattatccattttttagtataggaaattaaatcacatatgtatctttttttaatgagtcactttttgttacttgac

SEQ ID NO: 1064 - DNA, 467 bp, Homo sapiens
aaattcaagactagcctggccaacatggtgaaactctgtctctaaaaatacaaaaattagctgggcgtagtagcccgtgcctgtagtcccagctacttggatgactgaggcacaagaattgcttgaagccaggaggcagagcttgcagtgagcagacattgtgccactgtactccagcctgggcaacacagcgagactctgtctaaaaaaaaaaaaagtgcttcaaaagcaaccgtataacaaaaacatactgaacataggatttctgccattcttgtctgcctataaggatagacaaactatctcagataagtaactgagatatttattcaacggtattctcatccagcataaaatacttttttcaatgtagtaacaaacttaccatcttttactttaagggttctgttatttttgatttgcaatcagagcaatagtaaattgagtgagaaagttctgagttttac

SEQ ID NO: 1065 - DNA, 595 bp, Homo sapiens
taccagtaaggctaaagttatctttacagctagaattaagggtatgttaggactgtttggaagaggtaacgtaaatacatgtgaatagggtatataactgaattttctatgagcacaataatattccaaaatgatttaaagctgactatattgaatttatctgtataaaatagctttagaatgtataatataggctggggtttatggctcatgcctgtaatcctagcactttgggaggccaaggcagttagatcactttaggtcaggagtttgagaccagcctggccaacatggtaagaccctgtctctactaaaaatacaaaacttaaccaggtgtggtggtgcacaactgcagtcctagctgctcgggaggctgaggcacgagaattgcttgaacccaggagctggagactgcagtgagccgagatcaagccattgcactccagcctgggtgacagagggagactccatctcaaaaaaaaagaaaaaaatactgtaatcccagcactttgggaggccaaggtgggtggatcacctgaggtcaggagtttgagaccagactgaccaagatggtgaaaccccgtttctacaaaaa

SEQ ID NO: 1066 - DNA, 555 bp, Homo sapiens
tatttttaaatttacttttattggggcaggccttttcttttttttagaatgtaactgtagtatatgttgggtagggtcttttggcttttcttctaggtgtgttcagtgctaaagacagtattgtttccttggacataaatagtcttagtgcggtggctttctcaaatgccagttttagtagcagcaacctcctgagtagccagggtggtataggcaatgattgtaagaagcttatcttgttcccaagtgctctatagttgtgtaagcaaatgctgtaatggactgtgcactccaccctctaggccagtaagtaggtgacacttgcaggtaagacccatttgcagtggtagcagtttacaataattgaggaggtgagaattcttcctaactcattctatggagccagtatcatgctgataccaaaaacatataaggacacaagaaaaagagaaaactacagataaacatccctgattaacatacatgcaaaaatcctaggcagtgtactagcaagccggatcaaacagcacatcaaaaagatagtacagcatcatc

SEQ ID NO: 1067 - DNA, 691 bp, Homo sapiens
ttattttccctgttgcaatggtcccaaataaaatctgtttttatctatttagctactgatcagctcttgttttcttggacagttcccctgccccacctggccttttggtttgaaatgttagcttctttcacgactctcagagctagctgcctcatgtccctgcagaggtaccagtagcaactacgcttacattgcgaaccccagttctgtgaggactctcctctgttcctctaggctctgaaaaccccatcacttctcttttgttccttaagccctagagggggtggtaattatatccaactttgtaatcaattatttgagtctaattttctttgcttgatataacttgcgtggttcttgtttttttccagttggtccctgagcgacccattaactgacttaataacttaatagagaagagaaaactgaagcctgtttagatgaggaaataaacatgaagtgagaagactgaagccacaaaacatcagaaagtgtcagaaactgtaaacatgaggaacctgtgaagatgaggacaggggtgggatgaatagagaaggcctgagagtgtgtcttagaagcagttatattctacatattcttttccttttccatacagaaagatgaacgtttttacatggctgtggcaagaaacagaaggttcactttcacaataaccgaagcagcacagtct

SEQ ID NO: 1068 - DNA, 567 bp, Homo sapiens
ggtgggcaccgcgggaccagaaggcgtgacccacctggacccagctttcactgtcttgtgtgtgtctattatttctcaacctgccgatccacctaggagcagagagagagccccgttgcattgcaggctgctggccagatcccgcaatagctgctcaaacagaaggcaggttgtctgaatggagcatggtgaagagggaaggaaacagacttggcagtcattcacctgcagtgtccttgtcaagactcactaaatccgggaagcagctaagtggtccataaagggccgcctctggtaaaaggctggtttgttcacaggcttcttgtgtggctggtgtgaaacatcccttactctgtgctcttcctccatacccagaaagtgagccacagatgaccatctcccaaatactcagtgcagaaagtggaggtccttgtaggatggcacgagcatttttgttcctgggaaggtaggtttctttatagcaatttatgaggtggaatttggtttacatttcagtctcttgaatctggtttctggtgcagtccctcatgggctagatcttctctg

SEQ ID NO: 1069 - DNA, 424 bp, Homo sapiens
aattcaaacaattctaggtatttttgactacaaagatctaagatctttgcagagcaagcctatctgatgcttaaaaaaatatatattttttaaatttttgagacagtctctcactccgttgcccaggcgggagtgcagcgcatgatcatggcttactgcaacctcaacctcctgggttcaagcaatccttcctcctcagccttgagagttagctgggactgcgggtgtgcaccaccacacctggctaattttttttacttttttttttttcaaaaatgaaatcttggcctgttgcccaggctggtctcaaaccgctgggcttatgtgattctcctgctttggctcccaaagtgttgggattacaggcatgagccaccacctccagcctgaggctttttaaatatatagtatttaggtctggggc

SEQ ID NO: 1070 - DNA, 427 bp, Homo sapiens
gaatgtgacattaagctgggtcttaaaatatgaataggtgctagctaggtagagaagaaggcataggcattttaggtatatagagagtattgtgattgtggcatgcgagtagggtagtagatattctgttagggaaagagtagttagcctctgacatctggcaagtaccatgtgtggttggggctcggaaacaatgaggctggaggagtatgtctggagtgagatcactaagagcattgactgtggcctagctcggtggctcacgcctgtaatcccagtactttagaaggccaaggtgggtggattgctagagcccaggatttcgagaccagcctgggcaacatggcaaaaccctgtgtctacaagaaaaaaaaaattagccaggtgtggtgatgtgtgcctatagtcccagctacttgggaggctg

SEQ ID NO: 1071 - DNA, 438 bp, Homo sapiens
catactatgcccccaggaatatttcccacttgaattatctatgccagtggttcttaaacattgtttctaaaacaaaaattcttttgataattggaatcttacctgtgacccaatattaaattattcatttattatttatttggttcattatatacatattaatgacacataaatagtgtcaggctctggtctaggaacagtagtgaataaaacaaaaccccttgccctccttgaacttgaattctaaacagagaaaggtggcgctaaagagggagaggttggaggatggaatatccccacccttcatgtgggcctccatatgtttaccacactccaagggaactcgagagagctctctagaaacctgtttttaacaaaactgttaaaagtggctgggcatagtggctcatgcctgtaattcagcactctggtaggctg

SEQ ID NO: 1072 - DNA, 483 bp, Homo sapiens
ggggccaaagactgtcctttgaaatgtaggtatgtggggctgggtgcggtggctcatgcctgttatcccagcactttgggaggccgaggcaggcagatcacctgaggtcaggagtttaagaccatgctggccaacatagcgaaaccccgtctctactaaaaatataaaaattagttgggcgtggtggtgcacacctgtagccccaactactcaggatgctgaggcacgagaatcgcttgaacacaggaggcagaggttgtagtaagctgagatcatgccactgcactccagcctgggcaacagagtgagactccatttcaaaaaataagtaaacaaaacgaaatgtggacatgtgattagagcttgatgttttcttctgtaagtcctccctataatgaatatatcatctcacttccagcttcaatttcctacagatggagggagaacttagagccatccactacgcattcccactgtcaaagc

SEQ ID NO: 1073 - DNA, 450 bp, Homo sapiens
ggcccgggaggtggagcttgcaatgagctaagatcgcaccactgcactccaccctgggcgacagagtgagactccgtcaaaaaaaagaaaaattttgtagagagggtccccttatgttgtccatgttggtcttaaacttttgaactcaagtgatcatcctgtcttggcctcccaaagtgctgggatggcaggtgtgaacgcctgagcccagctcttctttaatgaaaaattttaaaatgtcatcagtaagtgggaaattactaaatgatgacatatacaatggtaggcactgtgactgtcacggaggatgtctgagatacattaatgaatttttcaaaaggctgcaaaatggtgtgtatagcaggatcccattttccccagacaaaatcagctctgtgtgctcacctaggtgcacatggacacagaaaaatgtcagcagggccgggcgcg

SEQ ID NO: 1074 - DNA, 451 bp, Homo sapiens
ggggtggccacttaggtgatcatggctgggtttgatcacatatttgggtattagctagttgtgggccaatctagggcggcttcatttaaaacaactgagctctgctctatgtggtctcttgtccttcagtaggtaagaccaggtttgttcatatggcagtgacagtttctaagagaatgagaagtgtgcaaatcccttgagacctagacttgaaaccagaagaacatcaaaaccaattaaaatccaaggagtgagaaaataaacatcacctcttggtgggagaagctgcaaagttatattgcaaaacatgtggatacatgaagaattgtggccatttttgaaaatgaatgatcacaggttttttttttttgacagatgaccttaaactttaaaatatggccttttattaaaatattaagtttttcacactacacctctttccttcccatat

SEQ ID NO: 1075 - DNA, 670 bp, Homo sapiens
aaatatctgactttgacagtccttttttgcttagctaggtacttcatgctagtttaaaaataaattgcaaaaagtatcaacagtattctttaagtaagtcttcccatattcattcatatccatattttacagaaattgttttgaaataatttctttctctttctctctttttttctctctctgttgcccagactggagtgcagtggtgtgatcacagctcactgcagcctcaatatcctgggctcagttgatccttccgctgcctcagcctcccaatcaagctgggactacaggcatgtgccaccatatctggctaatttttgtattttttgtaaagatggggttttgccatgttgcccaggctggtcttgaactcttgggctcaagtgatcctcctgcattggtctcccaaactgctgggattacaggtgtgagccaccacacctggcctctttctcaagtttcatttttaaattgcctttgacgtttgagtgttaggatgatagtcagattttggcaaaaatggcagttagccttagctactgcctcttgaaactctcctggtctctctcaattcttttagtaagtatcaaaatgatgattaaaatgctaagaataatagttaacatttactgaatgctcactcagaactttccttgaagtatctcat

SEQ ID NO: 1076 - DNA, 308 bp, Homo sapiens
acagaagggctctcagcttagaatcccctcctataggaagctggctcagatgtttcaagactggcttcggtgcttccactgcctccatccccttctgtggttgctgatttctgggcccttgcaacactaggttgcaaaagcctggttacttgtctggattctacactgggctaggggttcccatgcatagtcctggcacagtataagtgctcagtaaatatttgttgtaaattgatgaaggacgtaaggatatgcttttaaattgttgctttgaatgttcaacaatggccaacaggtatatgcaaata

SEQ ID NO: 1077 - DNA, 491 bp, Homo sapiens
gcaggcaaggtgggatcactcgcaccagcctctcatagcagcacttctgccatctcctgtgaaatctaccacacccaacaagacatgcttagtgaatggggtggaggctgggaaaattctgtgtctgagagttactctgaacagccagtccttccctggtaaaatgactgacgcttggtcggccacagtggctcatagctgtaatgccagcactttgggaggctgaggtgggagatcacaaggtcaggagttcgagaccaacctggccaacatggtggaaacctgtttctattaaaaatacataaaattagccaggtgtggtggcgggcacctgtaatcccagctacgcaggaggctgaggcaggagaattgcttgaacctgggaggcggaagttgccgtgagccgagatcgtgccactgcactccggcctgggcgacagagcaagactgtcttagagaaaaaaagaaagaaaatgagtgatgctctgccc

SEQ ID NO: 1078 - DNA, 496 bp, Homo sapiens
acagagggcaggaggctgaggcaggagaattgcttgaacctgggaggcagaggttacagtgaaccaaggttgcaccagagcactccagcctgggcgacagaacaagaatccatctcaacaaacaaataaataaaagttttatctatgggagtttcaaaagcatataatttttagagtaagttttaatctcaggcagactgaataacagtaggtccacagtcattgcattatctcaggtcatcagattgcaccattatcctatttatcatcctttgtatgttttaatagactcccgtctgtctccttatcataaaaggaaaatggtcttcttgtattgattttttagattttttgctgttggttcacaaactcaaatgccttcaggagctaaacagagaataaggctttggtcttaatggccccacagtggcaaggtcttatcttgctctggtaagaatggactgtggataatgatatggaatgggtttggtgactt

SEQ ID NO: 1079 - DNA, 558 bp, Homo sapiens
  misc_feature 500: n = A,T,C or G
atgactatttctctattaaaaacattccattagtttctatataagtttatttatggatcccagttcctatcctgaagcaatagaaggcgttttttgcttatccagtaaaaatgataggtattgactattttaggggctaaaaataagagtgttgcaggattaagaaaatgccttcaagtaccacatatatactatcaaagtcgatctgatatttaaatccttacgaatgcagaaagaactcttttggacaaatcagttgtcttcagcatcctatctatatttgtaaataaagttttattgaaacacaatcatgtccattcctatggtcagtggctgtttttgctctatagtggcagagctgagtagttgttacagacttctgtggtgaccttatagcccacaaagcctaaaatatataagatctgcccttttacacaaaatatttgacaactcctaggtattggaagttgtctggtagtccttgctgtcctcaattgtgnaaagatgaccaactaccacacacacacacacacacacacacacacacacacacacaca

SEQ ID NO: 1080 - DNA, 658 bp, Homo sapiens
ggggcatccgggatctggcgcggcttttgcttgtagctccagccagagctcggttagggcctcatcgctctgctcccgctccttagggaagcctcggtgattctgccacagcctcagcctctgtggctctgtgacctgccggtattggatgattcgtatctaagactctgggacactcctgaagtcgggaaatgacggagtcttcgctgtgtcgccaggctggagtgcagtagtgcgatctcggctcaccgcattctccacctcccaggttcaagcgattcacctgctcagcctcctgagtagttgggattacaggcgcgccaccacactcagctaatttttttgtatttttagtagagacggggtttcgccatgttggccaggatggtctccatcttctgacctcatgatccaccgtgcccagccaatcagtgttaaagttgtttaaggttacacttaagtttcaaaattgtgttttctattactgtgaaaaatgacactaaaattttcactttgaatatatagatcacttatgataatacggtactttgacagtattagttattctaatggaatatttttccatttatttgtgtctactgaaatttctgtcattaacatcttattgtatttagtgtatacatatttaatctcatcg

SEQ ID NO: 1081 - DNA, 644 bp, Homo sapiens
gacacagaggggattcctttcagtagccaggaggaccctgtccctgcttcaaagtcctgggcgtgtgctgcagggagggctcaagcaccactttgccatcctggtgggcatctttccaaatagctcggccttcttaaaaggagtaaatttgctcaaaggagaatcttctttcctgactaaagaaagatataatatatatatatgcatggcttagctgcattcctgtgtcaaatagcatcgtgtcatctacttgtctgtccccacccacccaggcagaaaccatatcttacacacatggggattcctagctccgcacactgtgtctctcagcttagaatcccctcctataggaagctggcccagatgtttcaagactggcttcggtgcttccactgcctccatccccttctgtggttgctgatttctgggcccttgcaacactaggttgcaaaagcctggttacttgtctggattctacactgggctaggggttcccatgcatagtcctggcacagtataagtgctcagtaaatatttgttgtaaattgatgaaggacgtaaggatatgcttttaaattgttgctttgaatgttcaacaatggccaacaggtatatgcaaatatgctcaacatcactaatcattc

SEQ ID NO: 1082 - DNA, 434 bp, Homo sapiens
ggcacctgaggtggggagttcgagaccagcctgatcaacatggagaaaacctgtctctcctaaaaatacaaaattaaccgagcatgttggcgcatgcctgtaatctcagctacttggaaggctgaggcaggagaattgcttcaaactgggcagaggttgcagtgagccaaggttgacccactgcactccagcctgggcaacaagagcaaaactccatctcaaaaaaaaaaaaaaaaaaaaaaaaaaaaaacccgggcccaaaaaaccaaaagaattgggttttttaaaaaccttttaatgggttgaatggcttttgttcggcttataacaaaacttttaactggaccccaggaaccccttattgggttaaacccaaaaaaaaaaaaaaaaaaattgtgtgtgtgggtgtgtgttttgggtgggggggttttttt

SEQ ID NO: 1083 - DNA, 544 bp, Homo sapiens
agaagggagatgtaagatttatgactactcctgaaatactaatgtggcaatatcccatctgcttaaaacagccaattccactaccgttaggagaaaaggaaggtataggatgctcaactcggtgtggaggcatgggttacaggcagtggggagggaatgtaattttctgatttaaagcacgtataatagaaaaaatttgtatctaatatatccattttaaaatgcaaataccctgtcccttttgctatcccttagtattacctaatacttattaaatgctggctatatgggcatatgagtcccctcaaacactttaatgtgggaagatggacaaatacactctttttttattgttctacagtaaaccattgttatgttatattctactgatttgaaatttataattttgtcaggacagtacgagacataaaagatttatcatgtaaatgagtaatataaacataattttatgaaagctgtttaagaaaactcattgtgtggctgggcatggtggctcacgcctgtaatctcggaactttgggtg

SEQ ID NO: 1084 - DNA, 527 bp, Homo sapiens
ggatcactacatttgttttttgctcttcacaaactttcctaagatgaaaagctgtttttccttcttccttttccactggctatcactgccttgggtgttttgaagattacacttcacgtggaactcctcttattgatccagaaccagtgatgttggactgcacggccctcacagggccagggatgcatcactgagccttccacatggaaacagtatccctctgtggccagactggctcccaaaagtgagggagaagtcccataaagttttgcagaaaaaatattgtgaaccaatgtacttgccaaaatcttgtaacatgcgtgaatgctctctctctctctgtcacacacacacacgcacacacacacacacacacacacacacacacacacactgtatataagagctcagaaaatatatcactcatgtgaagttctaaaaaaaaatgttttgaagatacattgtctctgaagaacatattatagatggaatagatggtaaattaaaaatataaaaccctaggggct

SEQ ID NO: 1085 - DNA, 527 bp, Homo sapiens
tcacctattatgttttatggccggagaaaagaaacttatcaactctataacctatcctgctaagatctccacaaattccctctgggtgggaaggaacaaaatgtcaccagtgctgtgacatagctacacagaggcctcagggctgagacctcatcctgaactgtttttgaatggtgtaaggaagtaacactattacaccaatgcctacacagtcagcttaaatatctcctgttatgctgaagatctgatttacccaaacatttattgggtgcctactatgtacttacatcatatgttggggacacaaatgtctaaggcctcgtccctactacaaagaaacttggggccacgtgcggtggctcttgcctgtaatcccagcactttgggaggctgaggcaggtggatcacttgaggtcaggagtttgagaccagcctggctgacatggtgaaaccccatctctacgaaaaatacaaaatttagctaggcatggtggtgggcacctgtaatcccagctgcttggaggctg

SEQ ID NO: 1086 - DNA, 514 bp, Homo sapiens
gctgcgagaagacgacgaggggggcaccgcgggaccagaaggcagtgacccacctggacccagctttcactgtcttgtgtgtgtctattatttctcaacctgccgatccacctaggagcagagagagagccccgttgcattgcaggctgctggccagatcccgcaatagctgctcaaacagaaggcaggttgtctgaatggagcatggtgaagagggaaggaaacagacttggcagtcattcacctgcagtgtccttgtcaagactcactaaatccgggaagcagctaagtggtccataaagggccgtctctggtaaaaggctggtttgttcacaggcttcttgtgtggctggtgtgaaacatcccttactctgtgctcttcctccatacccagaaagtgagccacagatgaacaaccatctcccaaatactcagtgcagaaagtggaggtccttgtaggatggcacgagcatttttgttcctgggaaggtaggtttctttatagcaatttatg

SEQ ID NO: 1087 - DNA, 572 bp, Homo sapiens
gaggaaagtagctgggatgatgcagtctttacagaagccaatcatcaacctcctattgaggaggaagaaatgagaggcctgagaaggaaagtgcatcaaactccccttactaacatcatacctgtcaggaaggaagcagatgagggctgtggggagagcccatccatcttttgtccacgtgggtgttcttaaaaaagtgatttatgatgccagagcagtcttccgtcatagcacacttagcatttactatgttcataacaagttagaaaagttttgtgcaagcagagcttggggaaaacaactctgagtttaagaaattcagtttaagaaacatggaaacatacttttcactctaccctggtcaaaacctgtctactctttaaagcacatgtaatatcatgcagtgaacagatcatggaccttggggaccaaacagacctgggcttgaattctagtttcactgcttgttagctgaaactgatcctgtttccccattcatatcatatctaccttacctgattctgggattgttttgcattagtttgtataattctattggaaactctttgtag

SEQ ID NO: 1088 - DNA, 473 bp, Homo sapiens
cgacagagggggtttggaatagtttcagaagaaatggtaccagctcctctttgtacctctggtagaacacagtgataaatccatctggacctgagctttttttgcgtctttctttgtcgcccaggctggagtgcagtggcgggatctcagctcactgcggcttacacctcccaggttcaagcgattcttctgcctcagcctctcaagtagccgggactacaggcatgcaccaccacacctggctaatctttgtattttcagtagagatagggtttcaccatgttggttagattggtctcaaactcctgacctcaggtgatctgcctgcctcagcctcccaaagtgctgggattacatgtgtgagccaccacgtctggccatctgagcctaagtcttaagaagacctgatcatttcaattcatgctcttaggagtctatagtcaccatttgagtcttgctggagaaagcatgtg

SEQ ID NO: 1089 - DNA, 566 bp, Homo sapiens
  misc_feature 210: n = A,T,C or G
caaatacaagctcagatagagctggcccccccaagccctaaccagtggctggacctatttgcctcatgtctgctgaatgccaatccagatatgggtaacataagcctcaggggaaaattttcttctgcatgtctatctgtaagctaattcagggggagattttcttgctttggcaataatttttagataaatctagagcactggggcagnggtgcatggtggcacacacctgtaatcccagcactttgggaggttgaggcaggtggatcatgatgtcaggaggatcatgacgtcaggagatcaagaccattctggctaacacgatgaaaccccatctctaataaaaatacaaaaaatcagctggccatagtggcatgtgcttgtactccctcagcctcccgggtatctaggattacaggcgcgtgccaccatgcccggcgaatttttttatttttagtagagacgggatttcaccatgttggccaggctggtctcgaactcctgacctcaagtgagccacccaccttggcctcccaaagtgctaggattacaggcgtgagctacca

SEQ ID NO: 1090 - DNA, 295 bp, Homo sapiens
atcacatacccacacacaaacaacaacaaaacaaattacccttaccctagtattatgtttgtgtgtgtgtgtgtgtgtgtgtatttgtttgctttaatgctatagtgtatagcgaaggcttttaacgtaccagtgttagttaaacattttagaaacttaagagtccagagctctttataaactagtttcttctccctaagaatataaagttcataaagcccagataatagacatttatcgtattttttatgaacaaaggaaaagcttttatgatattgaaatgtattggagttca

SEQ ID NO: 1091 - DNA, 325 bp, Homo sapiens
acagaagggaactcatgaaatataactctgtgctagatacatccactttctaaaagattatactcacctccgcctcccaagttccagtaattctcctgcttcagtctcttgagtagctgggattacaggtgcctaccaccacgcctggctaattttttgtatttttagtagagacagggtttcaccatattggccaggctagtctcaaactcctgacctcaggtgatcaacccacctcagcctcctaaagtgctgggattacaggtgtgaaccactgtactcggcttgtaaaataaattaatttcactcatctaatggggttaat

SEQ ID NO: 1092 - DNA, 512 bp, Homo sapiens
tagagacagggtttcaccatcttggccaggctggtcttgaactcctgatctcatgatccacccgcctcggcctcccaagtgctgagattacaggcgtgagccaccgcgcctggcccccaataagtttttctttggctcaaagtttctgtgtatggattgccacctcaaatgttccccgatttgttcttattctttttactgaagttcccacaggtcactttatttctagtatagtaaaaatacatcatatttacatcagagtaatgcattgctctggtatagtgatcagaattacaataaagctggttccatccatgactacttttgtagattttcccaatatgacttccaactttctgagattgtgccctgatcatcttgatgcaacagaatcatttcatttcttcggccactgatttcttcactctcctttaggatgggctattttgaaagagctgaacttggccgggtgcagcggctcacacttgtattcccatcactttggaagcccg

SEQ ID NO: 1093 - DNA, 595 bp, Homo sapiens
tttggaaaacatattgggggaataatcgaggaaaacttccctggccttgctagagacctagacatccaagtgcaagaagcacaaagaactcctgggaaattcatctcaaaaagatcatcgcctaggcacattgtcatcaggttacctgaagttaagatgaaggaaagaatcttaagagctccaagacaaaagcaccaggtaagttataaaggaaaatttatcagattaataacagatttctcagcagaaaccctacagcctagaagggattggggccctatcttcagcctcctcaaataaaacaattatcagccaagaattttgtatcaagtgaaactaagtgttatacatgaaggaaagatacagtatttttcagataaacaaatgatgagagaatttgccactaccaagccaccactaaaagaactctaaaagtgctctaaatcatgaaacaaatcctggaaacacatcaaaacagaacctctttaaagcataaatctcacaggacctatacaacaaaaatacaattttaaaagcaaaaacaaaaaacaaaaaaccaaggtacataggcaataaacagcacaatgaataaaat

SEQ ID NO: 1094 - DNA, 662 bp, Homo sapiens
gggagctgaggagccgttaaaatgctagggaaccacctcctgagattctgaatcaattgatctgaggtagagcccaggcatctgtattttaaaagccaaactaaaacaaacttaagcgattctgaagagcacccgttttggagaaccactggaggtggaaaaaggtaaagttatctttttcttttcctttttattttggagaggtgtggtagggagaggaaagataagaggaagaacaggatgttaaggttgtaaggagctgcagaaacttcaccttccttacaattttttcctctaagtcttctttggctgagaagctagaattcctctctttttgagaaccggaggcaaaatgagtatgttttgagtgtgcaggccttggaaaagagagagttcaaggtatgccagattcaagacttgtcaaactgtaggtaaggtttgttccataactctctcaaggaaaccttaaagagttgtcttccaagagccatgaaattataatttgatcagatctacttatacatctactcggtacccctaatagcaactatcacatagtacagcataatgtgataacgtgttactaatcagttgggtgaagccattaataaaatcattctgcctctttctctttttgagaattcagctttgaattctgaaat

SEQ ID NO: 1095 - DNA, 558 bp, Homo sapiens
agaaggggattattactaattaacaataactatcaagcttaatcatttagatccattagaaatatattacattacgaaattgttaacacatattatttcatatgtattttcatagcttggccaagggaatgatttgtgatggtgcatcttttctattaatgtctaataatgctgggtaggattaatacatagaatcgcagaatcgaaaagaacttctggagtcaaatagtccaactatatgtttcaagtatggatagatagccgactgtatttttaaataattccaatttagtaaacagctacgtttattttaaaactccaggttttctgaaagccaccaagtagttagaagaaatctcagggaaaaaagtctcacttgggcctagctttccttagcttttgtgcacctcatgataaacccccttgatggtcaccaatctattgctaaattagcaaaatttttggattgaaaattacgttataaaagttggtttcggttgggcgcagtggctcacacctgtaatcccagcactttgggaggccaaggcgggcggatca

SEQ ID NO: 1096 - DNA, 692 bp, Homo sapiens
ggtatcttagaatcatcagtgtcaaaagatattatctacaagatatgaagagaagaataggaaatctgtgaaaagtggagcagaacaagagcttaagaaaggcagtactgccgaggcaagacctaggggctcctgctggcccacagactccttgtaaatcttgacccatggttttctgaacctcttgagatctggtcattagttcccatgaacatattcctttctacaagcatttcattccaggaaactactggaatgagtctgctcctttcaccagaactcttaagtgttaaaataacaaaaatcaacacataaaatgagatgcactagctgtaaaattcatttccaaagatgtagggatgtcccaaattcaaaaaaagagagacggaatttaacctccattggaatcttgactgaacatggaagattactgccaatggaattagcgtagcttcagaataaacaagagtgggtcaactcattcacccactgattcagcccttcattgttatgtgctgggcattgttgtaggtattcgggggttagaggaaaatactgagacaagcaggagccctgcttctgaagcatttaccttctagtgggtgtgacagttaatgatcaatcatttgctcacttgtaaattaattattcaaaaaaacctattattaaatgttggggactcaacggtaagc

SEQ ID NO: 1097 - DNA, 541 bp, Homo sapiens
ggcacttgaaaaaacggtttgactattttttataaagacaaacatatatcagtcatattactcaacagtcacaagtctaggtatttatccaagagaaatgaaaatacattatacaacaacatacacaagcatgttcaggacagctttattcataatagcccaaacaacctaaatgtccatcaggaggaaaacagataaattgtcccgtggtttactcatataatgaaatactacctagcaataaaaaagaatagtctattggcagatacagcatcatgggttaattgcaaaaccttgtgacttgcaaaagaatctagacacagaactatatattatacaattacatttatgaaaagtcctagaactaacctacggtaaaagaaatcgatatttacttctggattggagtgccattagatataaactttaatacatgtatattcagtgtatctccagaaaaaaattcatctttcaaaagttccaactcatgcctagagacacaaaaacttatcattgcactgaggcgaaacttacagtacta

SEQ ID NO: 1098 - DNA, 516 bp, Homo sapiens
gggccctttcctccttccaccatgtgagaatgcagcaagaaggtgccctgtatgaagcagagggccctcaccaggcaccgaatccggtggcaccttgatgttgaacttctcggccttcagaactgaagttttgtggccatggggatgctgacaaagattgcttgggatgcacacaaggcagcggcgaagcctgaggggtgctgccaggccgggctctccactggccacgagtcactcacagatcctacaccatgcaattgtatcattgcctcatggaaaagaggacgctcttcaactttaacatgtttttgacacctgctaaacacctggtaatgctagctttctactcaggtctcttctcagctctcttctcagctctacagattataaatctttaatgctgacaaaggagttatcctgctgctgccagaaagaagctacacaaattttgcgatgctgtgaggcaaggcacaaatctcagaactgtggaaaacagagaatctttcccttcttcag

SEQ ID NO: 1099 - DNA, 474 bp, Homo sapiens
atgccgggggaggagccaagatggccgaataggaacagctccggtctacagctcccagcgtgagcgacacagaagacgggtgatttctgcatttccatctgagggaacaagaatacttggacacaattcaaagaacaccatcagatacctgaggtctagcttctggtcccaaatctgtcattcagaagtgtgtaacttgacaatttgttgaatctcactggattttatttctgtcaagagtaaaattaaccagataagaattatgctgagacatagcagtacctcaaaaagtggtggaggtaataagctgcaaagttggaacttgaatcccggacctcaagctccaaatccagaattcctcactttccccccgctacctgatacagaactggagaaaaataaatttgatttaattaagtgtagcagatcccaggaactattttatgtttaatgattactttcaagcttaatttg

SEQ ID NO: 1100 - DNA, 103 bp, Homo sapiens
tgtgaaaccatcaccacaatctatgccataaatctttttttgttttttgttttttttagagacagagtcttgctctgtcacccaggattgtgccactgcactc

SEQ ID NO: 1101 - DNA, 525 bp, Homo sapiens
cctacggctgcgagaagacgacgagggttccacagttatcgtcaagagctgcaaaggtcagtgaagcacatcgcagagaacccagggacaattgatttggaaagagctgtgagcagggctttttgtttttatttttttgttttcctcatcctttaatagtaccccatgaagcagtgtttctgaatggatcaatatgccatggaagtgaatattggtctggcagctgcttcattttgtttgtttacgctcgtctttggtggcagccaaaatttttattttgaaagcgtgaatcatctttgaacacttgatgtgcgtgtgtttgtgtgggtgtgtgtctgtgttttcaaaagagaaaaagtgctttgctcactcacagttaataaatgtttatatctgctcagctatcgtggttaccctcagcttgcaaaggcataaatcactggcttctgtcaactctggaattgacctacagattaaacgcagatcactatgagatagatactttccacattttttttttatttt

SEQ ID NO: 1102 - DNA, 648 bp, Homo sapiens
tttggccgagcggcctacggctgcgagaagagacagaagggattactgacttgtaacagccttccaaatttgagtttagagatcattcaagacatttcaaaaatagaaattcaaaattaccatgtgtcctttgtaatggacatcttttgggaaatggacatctataaaatattgatgaaagaaattaaagacacaaataaatggaaagatagttcatgcttgcgaagaatcaatattgtcaagatgtttatattatccaaagcaatctagaggttcaatacaatctctatcaaaattccaaaggcatttaggcatttttcacagaaatagaaaaaaaatcctaagttttgcatgaaaagacagaagaccccagataggtaaatcaatcttgagcaagaagaagaaagctagaggcataacacttcctgatttcaaattatattataaaactgtaataataaaaacagtataatactggcataaaaacagaccaatggaatagaatagaaagcccagaaggaaactgatgcatatagggtcaactaattcttgacaaagactccaacaacacaccagagggaaaaggtactctgttcaataaatggtattgggaaaattggatatccacgtgcaaaaacaagtgaaatt

SEQ ID NO: 1103 - DNA, 492 bp, Homo sapiens
ccatggtactgttttatggtttttagaacaaggttaacagaaaaatggtcaacatacaggtatgcaacaaatctcaataaatgatactggatctcaggtgtacacaaggaaagcatcacccacaaaggcaggacattggatacccaggttagctgaataagagaaactcaaaaatgattttcatggctgggcacggtggctcacgcctgtcattcccagcactttgggaggctgaggtgggcagatcacctgaggtcaggagttcaagaccagcctggctaacatggcaaaaccatttttagtctctaataaaaatagaaaaattagctgggtgtggtggtgcatgcctgtaatcccagctactctgtaggctgagacacgagaatcgcttgaaccccggcagggcggaggttgcagtgagccaagattgttatcactgcactccagcctgggtgacacactgagacactgtcaaaaaaaaaaaaaaaaaaa

SEQ ID NO: 1104 - DNA, 485 bp, Homo sapiens
gatgtttggagtataatggttattgtgattgattccctgacacccagtctaccccactatggtcatttcagttgactcccttatgtcaagtccctcctcctaagccactcatggcattcctgtgctccttgctggttatttattagttaaggattgggccattggtttggtcatggctaatgttgagggagcttctatgaaggatttccttgcttctaagaaagacacggagagaaggttgcctttcttcctttggtcattgctgagtctggttgtgatgcctggaattgctgcagttattttgctacccgcctgagaatgaaattagtatgttctgagctacaggattatctaattctgggtccttctcactttgggctttttatggcatgagatatatatcctcgttgtttgagacaggtttatttgttttgtttacagctgaaagcatcctaactggtaaagatgtattaattcccttcctg

SEQ ID NO: 1105 - DNA, 555 bp, Homo sapiens
ggccctttcctccttccaccatgtgagaatgcagcaagaaggtgccctgtatgaagcagagggccctcaccaggcaccgaatccggtggcaccttgatgttgaacttctcggccttcagaactgtgacacagagaatgagtggaatactaatacattgaagggcaaaatcaaaaccccagaagatctctaaaagtctgaatgaatcagcccatattacaaggtaaagtccataatggtaaacggaaggctctggtcttggtttacaaaatccaaccactcaaatatgtagttgctggaagttttgtggccatggggatgctgacaaagattgcttgggatgcacacaaggcagcggcgaagcctgaggggtgctgccaggccgggctctccactggccacgaatttgtacatatggctttggaaacctcatccaacactaagtaatgaacatacatgaggatactatgtatttttcaacctgcaagcccaagatttcaaattctttggtttatcgcagagaacacatctctcaaattgtcttcaaggagcactgc

SEQ ID NO: 1106 - DNA, 528 bp, Homo sapiens
acaaagggggtgtgtcccacatttcttggcgagccagccaggagcagagactgtctcctttgccttgaaatcggggctggagccccggattcaagggaaaatcggggctggagccttgattcaagggaaacctgggacccaggcaccgccgggagaacttcagcccggaggggaaatcagctctcccatgacccggcatccctacccagcagtgcaacggagcctgagaagggctacaggatgattccataaatagcgcactttacgaaccacgaacgctaataccatcaaaccagcaacccgagacaagcgggccacccagcaagacccacatcatccaacccggctgatcctgatacgagagcaagctgctgctaaagacaactgccctgctctggtcattctggaagctgaccagtctctgaatggcggaagcataagaagacaacaagccctactctagtcacacacaggaatctgactagtctatgcacagccaaagcttaagaacttgtcaagcaagtaaat

SEQ ID NO: 1107 - DNA, 434 bp, Homo sapiens
acagaagggctgggcgcagtggctcacacctataatctcagcactttgggagatcgaggcaggtggatcatttcaggtcaggagtttcagaccagcctggccaacatggacaaaccccatttctagtaaaattcaaaaattagctgggcgtggtggtgcactcctgtaattccagctactcgggaggctgaggcacgagaattgcttgaacctgggagggagagggtgcagtgggctgagattgcgccactacactccagcctgggtaacagagagagactacgtcaaaagaaaaaaaaaagaagaagaaagaaagaaatgtatcaacttgacacatcagggttcttctgtaagttaaaacctgggaagcgccctaccctggcgtttgaaatgtggctgaagggccgggtgtggtgtctcacgcctgtaatccc

SEQ ID NO: 1108 - DNA, 460 bp, Homo sapiens
gggaggaattgccacactgatttccacaaatgttagactaatttacactctcaccagcagtgtataggtgcatagattgggtagtggtcaagtcagagttcttaagctgtccctcacctgatggatacagtgaacccataagtaattctcatcagtagcagattttactgaggagatgagggctgtgcatggccatgttgccagttgccagacctctttcactcttcaagattccttgcttttccgtgtttcaaaaatgccatttagagttccatgatgaagctccatttccctttctcctttacatgtaacagtggagctcccagccttccacccagctgtagggtccatgtctgcttactcaaagacctgacccatctcttcccagttacaccctttaggaccccagaagtatcagtgaagacaatcatgttttgggctgccctcttccctctcccct

SEQ ID NO: 1109 - DNA, 550 bp, Homo sapiens
  misc_feature 329: n = A,T,C or G
gggggggaggagccaagatggccgaatagaaacagctccggtctacagctcccagcatgagcgacgcagaagacgggtgatttctgcatttccatctgaggtttataggcagaggtcactacagagtcaaccatcgtggtttctgacaagccttttccagctctgcagtccagagatcctgaacacgatcatcttctctatgtaatttcccattcccttaaaattcccttggattcactttgcggagggcaaagaggtgtgcttgatatggtgttttcttcatctgaggccaaaagatggagcatcagggtagaaggagaaattcttanaggaagcaggaaagaggagtccgagttgaccactggatgtttttttctcctaataatggtgcccaaacttctttttcaccaaggctgaatggccatccgcaaaatctccaacctaagagacggtttcatctacttccaggcaaaactgacaatgtgaaaataccggagtcactgagcaaattcactccagcctgtgctgactgagacttacatcttacaat

SEQ ID NO: 1110 - DNA, 374 bp, Homo sapiens
caggatactgaaaaattacattataaaaaatttttataggccatgcacagtggctcactcctataatcctagcactttgggaggctgaggcaggaaaatctgcagtgagctattattgcactactgcgccccatcttggatgactgaacgagactgtcagaagaaaaaaactttttttttataaagggagactgtaatataagcattgataatcatttgccttttttgctgaaacaaggacttgctctttcgcccacgctggagtgcagtggcatgatcactgatcactgctgccttgacttcctgggctcaagtgatcctcccacctcagcagcctgagtagctgggactacgggcactcaccacacatgctg

SEQ ID NO: 1111 - DNA, 610 bp, Homo sapiens
cgacagaagggctcaggcaaaattggagctaaaattcacactgtcaatgtggcataaaaacaaccaagccaaaagttaacttaaactaatcaagattggtagtatccccacggctcatcaagagctcatgcaagtcctctttggaggaatgcacgttacatacaagccttaagaaatttcaacttataatgtttgataataagggatatgagctcacaatcagaattacttaacacatgagaaaaataagccacttggggtcagtaaacaacaaaatcaattctaccaataacagcagcaataataataaaaacagctaacacttgtataggttactctgtagtgtgctagatacttgtcttaagaaatttatatttatggaagcatttaatcttcaaaataatccagtgagtaacaattactttatctttatttgccaaatgagcaaagtaaagcacggcatcttcagattttagaatgattagattcacatagaatctaaaacatatgtgtgtaatacatttgaggaaataaatgtcattaaaatcatgtctcaaaatgacccagcatatttgaaagactcaaagagaacttgtagaaatgaaaaata

SEQ ID NO: 1112 - DNA, 539 bp, Homo sapiens
gattttaaaaaatctttgctgggttgacaaatggatgagagatagtataagtaaaatgtgtaactcagtgcctaggatcgttgctgaataacgctacctattattattggaaagcattttgggacatttggacttttaagtttactgatacgttttttcagaaaagcagaaaaatcaacaacatggtttcaaatacttggatgaggctccattcactcccttagcccatcttacatatattactgcattgactggaaatgggaggcacttcacaattaggaatattgtcaggtcagccaggcgccgtgggcatgcttatagtccaagctactcacaaggctgaggcaggaggatcgcttgagcctgggagtttgaggctgcagtgagctccagcctgggtgaaagagaagaccctatctcaaaagataaaaaattttaaaaacctgtcaagttagatgttaaagaggacatgtaaaataaaatctccctaacatgtttatgaaatagctgcaaaaggctgagcgtggtggctcacgtct

SEQ ID NO: 1113 - DNA, 507 bp, Homo sapiens
gagggagcacttcccttcacagggattatagttgtgtgtgtgtgtgtgtgtgtgtgtgtgtgtgtgtgtgtttattaactgtgagccaagaaaatatatgccaaacatccactgtgaattcagtagtattgtaataaggttgtattttattattctacaaatgtatctacatactctgaaagacagtaatacatatgcttgggagacattacgtatttggttcacaaacaatgcatggagtgcatatggtttcccacacactattttgggaaccactggctagtagcatcagttcaagacttgcagatgatatatctaaatgctggggagagaccttaagttttattcaccttcttctgaaagaaaaatgtgacagccaggccaggcgcggtggctcacacctgtaatcccatcactttgggaggctgatgtgggcatatcacttgaggtcaagagttcgagaccagccaagacaacatggtgaaaccccttctctactaaaaatac

SEQ ID NO: 1114 - DNA, 567 bp, Homo sapiens
  misc_feature 434: n = A,T,C or G
ggggcaacctgatggggtcccttttcaagctgtggaacctttgttctttctctgtttgcaataaatcttgccactgctcactctttgggtccacactgcttttatgagctgtaacactcaccgcgaaagtccgcagcttcactcctgaagccagcgagaccacgagcctactgggaggaacgaacaactcccgacgcgccgccttaagagctgtaacactcaccgcgaaggtctacagcttcactcctgagccagcgagaccacgaacccaccagaaggaaaaaactccgaacacatctgaacatcagaagcaacaaactccggacacgccgcctttaagaactgtaacactcactgcgagggtccgcggcttcattcttgaagtgagtgagaccaagaacccaccagttctggacacaatttcaagtcctcangtgccatcaatattctgaaaatggcagtgatttttattcaacctgtataaggcactttcaccatgtacctggaagcaacatctacatctttttcagcatatccaaatgtttgctgttgatgagtgtttatatg

SEQ ID NO: 1115 - DNA, 516 bp, Homo sapiens
ggattgcgccattgctctccagcctggggagcaaatgcaaaactccatttcaaaaaaaagaaaagaaaagaaataactgccaaaaccccaggctattattttgttacccaaagcataaccaatctaccaaagccatccaaaatgcttcaaaaggccgggcgcagtgactcacgcctataatcccagcacttaaggaggccgagtcaggtgggtcacttgaggccagaaattcaagactaacctggccaacatggtgaaactctgtctctaaaaatacaaaaattagctgggcgtagtagcccgtgcctgtagtcccagctacttggaggactgaggcacgagaattgcttgaagccaggaggcagagcttgcagtgagcagacattgtgccactgtactctagcctgggcaacacagcgagactctgtctaaaaaaaaaaaaagtgcttcaaaagcaaccgtataacaaaaacatactgaacataggatttctgccattcttgtctgcctataagg

SEQ ID NO: 1116 - DNA, 542 bp, Homo sapiens
gggggttcaagcgattctcttgcctcagccgcctgagtagctgggactacaggtttcctgcaacctcactgggcattttcagaatgatctgtacaagcgttgactgaatgattgattccaagttcccccttcctaggatttcagacctcctcttgacaagtgatgaatgggccatcttaatcttgtttggatcagaaaggaccatacaactgagctttagacaagactaaaaataccaaaagtagcagtctgcaattttatgtgcatgtggcttgaagctctgacaacaacacaaaagattcccaaatgtggtactcattctacctggatataccagaggattttgtgggaataaaaggatgactgttttttcacttgaataattagatggagtctagctccgtcgtctaagctggagtgcagtggcgtgatctcagcttactgcaacctccgcctcccgggttcaagtgattctcctgcctcagcctcctgagtagctgggattacaggcacccaccactacacctggctaatttattgta

SEQ ID NO: 1117 - DNA, 550 bp, Homo sapiens
  misc_feature 105: n = A,T,C or G
gtacggctgcgagaagagacagaagggctttttcatcaggcatcctggagcccatgcaccttaaactttcccagcctctgctggccctgatcccttgtctctcangacacagctcaaataccacctcctccagctcacctcacgcccaccatttggcaagtcctaagttcttgtcctgcatccaggaagaatgaggtatgcggacaactggagggtgaacaaggtggaaaggagctttattgagtgacagaacagctcttgggagacccaaagtgggtggctcctatctgcaggcaggtcatcccagtgaatgtccagctctcagtggagaggagacccagagtgggcagctcctattcgcagagtcatgtggaagcaccaggatcccattcctaccactgaaattaaacaaatgaaaaaaaattagcatgaaattctttgtgcgtggacagtgacctgagaagacaataagacatttcaaagcattgagttaaggataatgaagtttataaaatctagtggcaagatatagctgactcttgacacagac

SEQ ID NO: 1118 - DNA, 540 bp, Homo sapiens
agggacacctgatggggtcaggtgtgatggctcacacctgtaatcccagcactttgggaggccgaggtgggcggatcacttgaggttaggagttagagaccagcctggccaacatatagtgaaaccccatctctactaaaaatacaaaaattagctgggtgtagtggcgcacgcctgtaatcccagctactcaggaggctgtctggaaaatcacttgaacctgggaggcggaggttgcagtgagctgaaatcacgccattgcactccagcctgggcaacaagagcgagactccatctcaacaaaacaaaacaaaaaaaacaacttgatggatatctttgtcagtacatataattctatttggttctttttaatggtcacatagtaagacttattatattagggtcagcaaagtatggcctctagaccaaatatggcccagcacctaaaagaagttgtatgggaacatagccatgcctattcctttccatagagtctcagcctgcttttgcactatagtagcagaattgaaaggttgcatc

SEQ ID NO: 1119 - DNA, 483 bp, Homo sapiens
tcgagaccagcctgggcagcatggtgagacccccatctccacaaaaataaaaaataaaaaaatcagccaggcgtggtggcaaacacctgtagtcccagctactactaaaaggaggctgaggcgggagaatcgcctgagcccaggaggttgaggctgcagtgagctctgatcgtttcactgcactccagcctggtggcagtgtgataccctgtctctgtgtgtgtgtgtgtgtgtgtgtgtgtgtgtgtgtgtgtgtaaaatatagaaagtaaaagccttccccaaaagtatttctacctttcttgaaagaatcactattatcagtttggagatgttctacatatttttttctatattattctaacatacacactaatttcaaatgtgtgagaggttttttttttttactgaataatataccttgtatatcattccactaaaataccggacgggttttttttcccttaaaattttttttttttt

SEQ ID NO: 1120 - DNA, 534 bp, Homo sapiens
agaatcagcacatgactgtctgaaactccacagcaaatcagaacagctcaaaagggctgcatggaattttagtgaatccagaggccttgttccccgtaatttggagttctccttcgaatttgaccaactcaggtagagttaatcaaatctgatggaagaaaaccaaaataacaaaacaaatatgattactgaggacttttaatggaatgaggctcacgctgaacactgctgtctaccatctatgaagcaggaaaaaactcaaactcactttctctgttggaagggagcagaaactccagaaaggacttgctggccctccatcatcatggaaacaggaaaactaatcttccttgttggaagtgagtaaaactccaggaaaggagttataaagcaaaatgaaccttagacctcaaccaaatttggggagagcaatgattctctgaagggacctcccagacctcagcaaattgtattattggtttgagcaataaagataggccaagctggtaccaagcatggatggatttgtcaaag

SEQ ID NO: 1121 - DNA, 542 bp, Homo sapiens
gtgggagctacaattcaatatgagatttgggtgaggacacagccaaaccatatcagtaataagtgctataaaaagtgggagaggaaagattggaagtgggatattgctatttaaatgatactggaaaaaaagtctctctaataagatgatatttgagcagaaacctgggattcaagttacaggaggaagctggagtggctgaaaccagcaagagggacctgcaagcagctatgtggggtgtgtgctggaagacatcaagtaaggctgtgaaggccacagtggaagccttccattctgaatgagactcatgctgagcatagaaatattcctttttttctcatttccattccaaaccatttttcctcccctaccaccccacaaccctaccttaaacatttttaaattattcttatgtcatcagattctacccccaccaccttcctgtgactgtcatacgcaaccccaagtctcctctcttttgtagagactgtagctcccggctcaagatccttctgtcagtgaccctgttatccctgtaactc

SEQ ID NO: 1122 - DNA, 551 bp, Homo sapiens
  misc_feature 158: n = A,T,C or G
atgccagctccctcttcctcaagggtagtgtccctggaatgaagccaccagcaacaggagaggaaacagatggggttgtagaaagtaggagcagcaaaagcttctgaacttagtaataagctgcttgccccgggacagaatctcactctgtcacccangctggagtgcagtggcatgatcttggctcactgcaacctccacctcctgggttcaagcgattctcctgcctcagcctcccgggcagctgggattacagctgcatcgcgagagctcagaagctcagtcaatgcaaaacagaaggcactgagggaaaatttcagatgagaatggacgtaccctctccagaggcaaagaagtttgcaaattactttttgaagccctctctatataattttgaggttaaaaatgctttcctcctgcgaaggagagattttaatctggattgtatgctggagctcaatgattgatccaaatcaaagtccagaagcctcatgggaatgatgatcgtcagggctacagtggggcaactgcagatggagcttgcccctctc

SEQ ID NO: 1123 - DNA, 529 bp, Homo sapiens
acagaaggggaggttagaacagaaaatgctggagataagactagaaaggcagtgtgatgtttcttaaatgccaagggaagccaaacccaatgctttagaaagaggttgagaagaaaattgagggtatttgagctggaaaaaatgtaatcaagctgatgctttaagattaatctggcaaccttaaataaaatggattggtaaaaaggaggacaaagccagaaacaccatttagactttagagattactttcaaagactatctcgtttgatcctcacagcaatttcatgaggcaggtaagacaaagcattatcaaagcctatttttgtatcatcataattccacttgtatcatattgatgactagtttaatctacatttaaagcattacatacaatttgtaatagacttaactttttactgttctaatcagtgtattaagatgcttggtcaaatttcttgcccctagtgttcagagatcatttgttaaaagaaaatcagggccgggcgcggtggctcacgcctgtaatccc

SEQ ID NO: 1124 - DNA, 452 bp, Homo sapiens
ctcaaacaacagatgaaggcaaaatactctgtactgaattttcaatgtaatcttaaattctatgtttaattgagatgacccaaattcttttttttttttttttaaaaccccagtctccttttgtgccccaggttaaagggcaggggcttgatctgggttaattgaaccccccccctccggggtaaacacatttccccggcttaaccctccaaagaaccgggaactaagggcccccccccccccccggggtaactttttggatttttaaggggaaacaaaaagaccccaatttttaaccggcctaaaaaaaccggaaaatttttgaaaattttgcccttaggcttttttaaagcccacctttaaaaaaaaagtttctcttttttggaaatgttttttaaaaaacttccccccaaaaaatatccctttttctttgttaagaacccccattggtt

SEQ ID NO: 1125 - DNA, 558 bp, Homo sapiens
caggcactcttcacaagtggagtgtcaccttcccaggccactgacactgacagctatcctgacccccaggagcagggccactgcacacctgcaggcatcctcaggggatctggggactcacctgcctgggcactattccaggaccagaacacatgcccatcccacccattgctgtcactaccactacccaagctcgttgtccatgaagctggggatcaacccacactgctctctgtcattggcacctgtgcatgccttcttgtgacctgagtatgagcccacccaccctggtggtgcctgtgcacattgtctgggagcctggggattaatccaccatgcctatcaccatcaagtgcctgtgtgtctcctgagagcctaaggataggacttcctagcctgccatcaccgctgccaccagtgccaacatatttgcaccatgtgaaagcctgaggactactctgtccatcatgttgccatgactgttggtgtctgcacatgccatctgaggtcccaagagttcacctgctatgactactgcaattgctgatgctacacatg

SEQ ID NO: 1126 - DNA, 517 bp, Homo sapiens
  misc_feature 416: n = A,T,C or G
acgacagaaggggcagcacgtgcgcactgaaccctggagtcctgatctctagcctagctcaaagcctccaccaggatcgggtggcagcttccatttgaggccatttctaggccagcggccctgcaatgagaagcattctggagagatgccagatttcttctcccttgcacggtagtcccctgcgggaagccactcccagccccagaagagggattccctttctaaagcaaagcagtgttccctacttcacccaccccagagtcattccacagcctctgcctgtcctattggtccaagggtgctatggtcagaatgtccgtgaccctcaaaactcacatgttgaaaacctaatgttaatgtcagggtattaagaagcggggccggcacggcgcggtggctcgcgcttgtaatcccancactttgggaggcggaggcgggcggatcacgaggtcaggagatcaagaccatcctggctaacacggcgaaaccctgtctctactaaaaaatagaaaaaaat

SEQ ID NO: 1127 - DNA, 466 bp, Homo sapiens
aacaaaactaagtgataagaaattgatcaactcagccaggcgtggtggctcacgcctataatcccagcactttgggaggccgaggcgggcatatcacctgaggtcaggagttcaagaccagtctggccaatatggagaaaccccgtctctactaaagatacaaagagtagctgggtgtagtggcgggcacctataatcccagttgctcgagaggctgaggcaggagaatcacttgaacccacagggcggaggttgcagtgagctgagatcaggtcactgatctccagcctgggtgaaaaagcgaaactcagtctcaaaaaaaaaaaaacctctaccctttattatggctggcatactttgaaaaaaaattttttccaaccactaccctcaattatttctaaactatttttaaacatttattaaatatatggattgggcatatataaggagtctagttaggcttaaa

SEQ ID NO: 1128 - DNA, 378 bp, Homo sapiens
ataatttgtatttggctttggaatgcacattcacagaaagattccctaaagtgtgcatccccactctgttcttaggactgtgtgttttgggggaggtgtggatgctatgtggatgctgtgtggatgctgtgtggatgctgtgtggaggtgtggatgctgtgtggagctgtggatgctgtgtggaggtgtgtatgtgtggaggtgtggaggtgtcaggtgtggatgctgtgtgaaagtgtggatgctgtgtggaggtgtgtatgtgtggaggtgtgtatgcgtggaggtgtggatgtgtggaggtgtggatgtgtggatgtgttggtgtgtggatcctgttgggaggactggaggtgtttattctctttggaggtgtgg

SEQ ID NO: 1129 - DNA, 491 bp, Homo sapiens
tggcgagcagtttaacttaacctgtggtctaagtactttattttacggttttatctattcatttattcttcaaataatcattgagaacctctatgttacaggtactattttaggcattagggctataccagtggacaaaatagataaaatccctctcaccttggaacttgcattaaagtgagtaaagacaggttataaaatggtaaataaaggtaatatatagtttgtcaggtggagataagtgctaagcagaacatgaaagcaggggagcttgcgtggcatatgtaacatgtgggatatagggaggagtaaaaagagaagtaagcagttttagacagggtgaccggggaaggtttcatcaagagggtgtttttgttgttgttgttgtttttaaggtaaatatttgaaagatgagcactattgagccatataaattcacggaaagaaaatggtcgaggaagtgggtatagcatgagcagaggcactctggc

SEQ ID NO: 1130 - DNA, 580 bp, Homo sapiens
agaagggtactatgacgcttctcattatctttctggttgggataacagggagagaggagagtagagtggctagaatggcctcagtacaggatgacagagagaaattaccaaaagaaaaagccacactgtatgaatatcaatacacattccgaccaggtgcagtggctcacacttataatcccagtgctttgggagggtgacatgggagaatcacttgaggccagaagttcaagaccagcctgggcaacacagcaaaaccccatctcttttttttcttttttttctgagactgagtttcgctcaggttgcccaagctggagtgtaatgtcctgatcttggctcactgcaacctccgcctcccaggttcaagctattctcctgactcagcctcctgagtagctgggattacaggcacctgccaccacacctggctaatttttgtatttttagtagagatggggtttcaccatgttgggcagactggtctcgaactcctgacctcaggtgatccacctgccttggcctcccaaagtgctgggattataggcgtgagccaccacacccagcacaaaaccccatc

SEQ ID NO: 1131 - DNA, 472 bp, Homo sapiens
acagaaggggctactgggaggaacgaacaactcccgacgcgccgccttaagagctgtaacactcaccgcgaaggtctgcagcttcactcctgagccagcgagaccacgaacccaccagaaggaaaaaactccgaacacatctgaacatcagaagcaacaaactccggacacgccgcctttaagaactgtaacactcactgcgagggtccgcggcttcattcttgaagtgagtgagaccaagaacccaccagttctggacacaatttcaagtcctcagggtgagttttccccagctgagtgagaatataaattagtcacaggagtaccctgaatcactgtttggttggactagtttttctaggtgaacactgtgctggctgtgtggcacaaactcctgattggtcagactgaaatttccttgcggaagaaagaagagtatgtttttattgaatcctattatttcttaactcct

SEQ ID NO: 1132 - DNA, 535 bp, Homo sapiens
  misc_feature 216: n = A,T,C or G
aggggactgcacatagctgctggctgcagtggggtgggcagctccagtctccagcacaagagccagctccttgcgaggctacagctggaccagacatcccacaagcagcttccacagatggcactagggaatgcagtggcacccaaaagcttgaaggcaccaggaaccacagagccccaaagagggtgtcacagtcctggcttggggaactcctanatctgggctccctgaaggactgcagctcttctctccttcttgtcacccacaacatgagatccataggatgagccacacagaataagagctgagtatattgactgacctataggattatgcaaagtcaaaattcagttcttcatatacagaaaagggaaattaccctgagaaggtaatagctgaattgaatatataagaaagaaagttaaaagtggcggggaagataaaataaggaggaagcattcaggcataagagcagccctaatatagctcttatagcctcatcaaatggtcggtgagatctgagcactgaaagcag

SEQ ID NO: 1133 - DNA, 477 bp, Homo sapiens
acagaagggtgatgacaccctgggagcatggcctcatggccggacctctaaagtcagtgtaggcccttcacggaaagcccagcacttcctctttctggaagttgtagttaagagaatgggcagggaaatcttcaccagaacaagctgtaagttgtgttttcctgacaagatcgcaagctctagccaggcacagtggcacgtgcctaaagtctcagctactgggaaggttgaggcaggaggattatttgagcccagcaatctgagtcagcagtgagccacgactgtgccactataatcatgcatctcaactgagcgagacccttcatttaaaaaaacaaaaataagcccgggtgcagaggctcatgcctgtaaccccagcatttcgggaggctgaggtgggtggatcacaaggtcaagatattgagaccttcctggccaacatggtgaaaccctgtctctactaaaaatacaaaaaat

SEQ ID NO: 1134 - DNA, 500 bp, Homo sapiens
tgaaatgtttaactcctaatgctacatgtgaactctaagtctcaggattgcccctgagctatgcacatgcagaacagagccaaataagcacagcaaagtctttgacacttaactactatataaaccactgaccaaagtccctgactaccctgggtggcttatgtacctggaagacctgaacaacaaaggctttgaagactaaactgacaggacaatcaccaaccacagaaggagaaagagaacatgtaggatgaattgaaaccagctgatcatctgctgtaacaaaaacttcaacattctccagattttaacaggacccaatgtcttaaaacataatatgcaaaatgttcaggatataatccaaaattactcaacatacaaagaaccaagaaaagctgaccatttctctagggaaaagaaaatcaacagctacaaaccccaagatgacccgatattaaaactatcagacaaagattgtgaagtgagaagttcaagaagtc

SEQ ID NO: 1135 - DNA, 653 bp, Homo sapiens
acagaagggactttgtctttaatatacatattcttaattgtctctgattatggcctcaaaacatacagttttaaaataattttatgattttttcctacggaggtaaatgcctcattcataattttgaaatgtaaattaattttcttttcatatgatgttttgatttcaatgtattagattttaatacatagaaaaatatattttgtgtaagtacttgcttcaaaagaattaaaaatcaacatttataacttcaggtgaatgagatattcataattttttttggcctcactactcatctcctaaactacagtcccatttttcttactcttctttgtagcaaaacccctttaaataattgttcttatttctcccctcatattttatctgaagcccattttcatcaagcatttgctccaactatacccaaagcttctcttatcagcgtcactaattaccttcatgttctcaaattcattagtaaattctcaatcttcttcctgcttgatctatgagcaacacttgacagtattggttacttcatcctccctgtatccctggtcttcgggtactgtgctgtcttgctttgcccctaatttattagtcactccttgttaatctcctttgctgtttaccctgttatacctgctttctta

SEQ ID NO: 1136 - DNA, 507 bp, Homo sapiens
  misc_feature 209, 463: n = A,T,C or G
agaaggatgtttataaatgcaaagggacagaagaaatactttgagtgaatgtggcttaaacaaagtcaagcaggtttatttactgctggggtttttgtaacattcaatatactactttatactctaaatttctaaaagggggcaacaacttgttgcatttccctaattaattggagaatgaattctttttattaaaacatgtctcctanaaaatgttctgtagggttaggaaaacactgacataattcagtatcattattttatctataaagagattgaagctcaggactgccagatttaacaaattacaatgcaagtcttctagcaaaatttgaatttcatgtaaataatgaataactttttatcatttgcataaggcatacttatactgtactaaaaatatattacttatatgaaatttacatttagctgagcattctgtatttttgtctggtgatcctancaattggcttatccaaaatgacatagcaaatgcatagaagaact

SEQ ID NO: 1137 - DNA, 573 bp, Homo sapiens
ggagcatatgtgcagctatcactgtaaaatatgtcatgtacaagctgtagatttctcaatttggcatttaagatccttcacaatccttttcctgattacaggtttccatgcttcttacccttcagctagactaatgtgcctggtatttttttataattacaaaatatgcaaattgtggcatagtcatacaatagtatattattcagcaatataaaaaactactagtacatacaacatcatagatttatttatatatttagattccacttatatgaagtttccaaactggtaagtctattctatgatgatcaaaatcagaacagcatttgcctatgggggatatagattgactgtatgggggaacaataacacttttggggaagaggggaataattaatatcccgatttggttgattttatttgggtatatatatttctctacattcattgaattgcacattcaagatatgtgcatttcactctatgtaaattttatctcaatttttaaataggggaaaagttgggcacttttttatttttatttttttgagacggaatctcgctctgtccccc

SEQ ID NO: 1138 - DNA, 615 bp, Homo sapiens
gatcccagccagcactttacaaactgtctctggaagttcacatggatgcttcagtgtttacattgtttcaaattgttagctctttttaaagttgtaataataataatattatttttaaaaaatactgctatgtgttatatactgcatttttacgtgttgaaggtcaccagctttttcttttaacatctgtttaattgaagataatcctgagattatagggcaggctgtgttttttaaaaaaatgtatctacttattcatcaaatgcatcaactctccattaaattaaaaagattttttttagcattgggcaactaaaaccaaacagaaaactatactttgaggcagatgtaagctgcaagctgttgtctccaattcctgagttcagattatttgtgttcatcagaacaacctcattgtcctcgttggttaattttcagtaaataaatgttattaatttgaaaattagaaatttgtaatcataaaatgcacctccaagtcttaccaattgaaagacttcactcactgaaaacctaccagcttctcagagaacatgaaactggcattcctcagttgtttgggaattccttctagtccatcattatttatttattaaa

SEQ ID NO: 1139 - DNA, 544 bp, Homo sapiens
gggcatgataagtttgaattaaaatcatttttttagaaaaaaaatgcatctgggcctggaattttagtacatcatttcgttattgttgtccaattcaaatatatgttcctctagctaccctcataaaatattttaaacttctctgcttcttggtatgtcatgtgtatgtaggtcctttgaatttatttatttactctccaatccataacctaaaacttcaattattccacaattccgaatattaaagaaatatgggccgggcatggtagctcgtgcctgtaatcccagcactttgggaggccgaagcgggcagatcacgaggtcgggatattgagaccatcctggcctacagggtgcaaccctgtctctactaaaaatacaaaaattagctggacgtggtggtgcatgcctgtaatcccagctactcgggaggctgaggcaggagaatcgcttgaaccagggagtcagagtttgcagtgagccgagattgcaccactgcactccagcctggcaacagagcgagactctgtctcacaaacaaaac

SEQ ID NO: 1140 - DNA, 509 bp, Homo sapiens
catttcctaccttctttcataacactcctccccaggctcgcttcagccatgctggtcttctttttcctcttacaactcacaaagctctttttgcctctaaggcgttcaaagtggctggtccttctatctcagtggctttcaaacattttttgacctcactgtagtaagaaatacacttcacattgtgactcatttaggcatgcatgcatacatatgtatgagaatatacacaggtcacatgtgtataaatatatgtataactgaaacaaaagttttccttcatgtgatgtatcctaatagtttcttcaattgtggtcccagctcactaaatggatttcgtgtgtccactgcagtaagtcagggccttaacttgaaaaacactgctttacatagactgcctttcccaaatcttttcttggccagtttcttgtcattcgtgtcttatttaaaaagacaccccggccgggtgcagtggctcacgcctttaatcccagcactttgggaggccg

SEQ ID NO: 1141 - DNA, 573 bp, Homo sapiens
  misc_feature 448: n = A,T,C or G
gggcagatgtctcagtctatctcccccaccccttctacccctctgtcctgtcttcctagctgcctctttccctctgctgtgctctccctgtgtccctaactagccctcttaggtcccctttcacttgttcccatctttttctgaaaaggggcaatagaaatgaacatgacttatcaaatttggaaagctggtaatagttttatacacacatgcacacacacacacacacacacatattcttcatctcctctcatcttttcctccctgtctctgtccctgcctatttctctggactgactgccctccctcttcttcatttctcacgctcttcattctctttcctcttcccagatctgtttcaggctatcgcctcctccctttgacaagacaggagtgatctgagctcccctcttgccatctgcaggaatgagatgcctgagtagcccangaggatgccgccaaggggcacagcagagttcgccttgaagccacagactggaccttgaattccaacccatctgcctgatcagtcatcgatgctccccatgcctcagtttatcaataaaatgatgt

SEQ ID NO: 1142 - DNA, 577 bp, Homo sapiens
gatgttgcataacctcatatgacatgatgacaggtctcattcattctgtctctctcttcctctctccctctctcctctcacacgtgctctctctccccctccctccgtccttccctctctccatctctgtgacacatgcacagacacacacacacacacaccacaaaaacgttcagatcaggaggtgagtctaaggaaatattttgaattttggcccctgtaaggatcctggaagccctccaatagtgacatttacaacttcaccaaagccatggtccttttatgacaataacaccaaattgccctgtacagagatgcataagcttactcaatatatattttgccagctgtttgtaattatttttaaatgtgtcattatgatgtacagtgaaccacaaaagcacatgttcggtaatgtaaaacaacaatatgttgcaaattagcctcctttaaagaaatattcaaaaaacaaattacaaagtttaaaaatacaccattggatgcatgtccctacattgctctgtgctcatttctgaaatgtggttggcagaaggacaataatttgtccttgttcttg

SEQ ID NO: 1143 - DNA, 574 bp, Homo sapiens
gaaattgtttttgggtgatgaaagtatgtgtgatttatttcttatttgagaattttagtttgtaccattgagatgtttttatttttatgcaagattgaaaaaaacatggaaggcaatggaaccatagttaaatatgagaattatgaaaacagaataaatgctatatatttttttcttttttccccacagtcccatcagctatcaagtttctttatttgtagggagaaggaaaaggccccccattcaccacaattctgtacatgcctcatcctgtcacccacagcagtcaacaaagagtgcaaggcagattattccaaaaagaatagcagttgacatccaatagtgccaaaactgtttttagtcaaagagactttactgagagccctcatttataaatgtacttggcattgttgtttaaatgcattggcattgttgttcatttggaatgttccactctaagtatctttagtaatgttttgccatttctgtaagacttggtatacagtcctaatgtataagccagaaggaactcagttttacagaaattaaggatcccatttttatctaaaatatt

SEQ ID NO: 1144 - DNA, 409 bp, Homo sapiens
  misc_feature 53: n = A,T,C or G
gagctaaggttgctttggaggaggtgggcagggcttttgtttgtgaggtctanaaaccacagtgaagaaggaggtgtccctggaactccccctggctgcagggctcacagcacacaccatgacaccacaggggtgtgtgtgtgtgtgtgtgtgtgtgtgtgtgtgtgtgtgtgttgaggagagtgttgttgatagccaactatgccaagatatccttggagacagcggacatacgcacagctatgctctgtcaagaatgatttcacccacacccttttcttgtgataccttgtttaactggagagagggtgtgctgggttgtgtttgctggtgagcccaacaactgcacccttctttacaggcctaacacccagcctttatcagtctcatggccctggcacaagtgggc

SEQ ID NO: 1145 - DNA, 554 bp, Homo sapiens
ggggggtttttccgggatctggcggggcctttgtcttgtgctccagctggagctttggtcccgtattctcggctatttatccccagctgcgggaggccctggtgactctgctgctgcagtgtctggtttccctgtgacctgcaggtactgggagttacatagctaagatgccaggacaccccgaaagccggaaaacgagacgcattctcactatgttgcccaggctggtcttgaactccttccctcaagtgattcttctgcctaatcctcccaaagttcttagattacagggactactggcattcagtgatgtggtcatagaattctctccagaggagtgggcatgcctggaccctgcccagcgaaatttgtatagggatgtgatgttcgagaactacagaaacctggtctccctgggacttccaggactatgttaaaatagaagcattgataatgggcacaatatcactttgcattggtgtctgtgcatttgaaggagcaaacacctctaccagtttttataaactggtttatacagctattttatcttattc

SEQ ID NO: 1146 - DNA, 540 bp, Homo sapiens
cagaagggtattccaggcataattataagtcatattttaaaagtagtataaaaaaaaccacatattattcaggccaggcatgatggctcacgtctgtaatcccagtacttttggaggctgaggtgggtggattacctgaggtcacgagttcgagaccaacctggccaacatggtgaaaccccgtctctactaaaaatacaaaaattaaccgggtgtggtggcacacgcctataatcccaactacttgggagcctgatgcaagacaattgcttgagccctggaggcggaggttgcactgagccaaaatggtgccactgtactccagcctcaaaacaaacgaacaaacaaacaaaaaacatattcaattgtaatctggaaatataaaatttattacaagggattaaattgatattttacagagagtcttataagaaatagtctctgagaattactgttaaatgttctatgttagaagaataccactggaataatgacgtgtgaataattgataacttacacagcttggtaaaagtctctgca

SEQ ID NO: 1147 - DNA, 300 bp, Homo sapiens
agggtccaccaccatacctggctactttttggtggaggggagtagagacagagtcttgctatgttccctgggctggttgtgaactcctgggctcaagcaatcttccctctttggactcccaaagtgctgggattataggtatcagccactgtgcctggtcaaattactacatttctaatgatgtatttttacaatttgggaaagtttgggcaacttctgtgtagtcataaatgtttttctttttcttttcttttctttttttttaaattgagacagagtctcgctctgttgccaggctgg

SEQ ID NO: 1148 - DNA, 577 bp, Homo sapiens
ggactccgttgcccaggctggagtgcagtggcatgatctcagctcactgcaaccttcacctccccagttcaagtgattctccagcctcagcctcctgagtagctgggattacaggcacgcaccaccatgctcggctaattttttgtattttttagtacagacagggttttgccacgttggccagacactgtgaatgccaaactgtctggaggctgccatgagcggccaatttgtgatctctgctttacctgaattatttccgtgaattgtgacatcaacctcgccagattggagtgcaatgtcacgggatctcagctcactgcaaactctgcctcccgggttcaagcgattctcctgcctcagcctcccaagtagctgagattactggcatgtgccaccacgcccagctaatttttttgtattattagtagagatggggtttcaccatgttggccaggatagtctcaaactcctgacatcgggtgatccacccgcctcggcctcccaaagtgctgggattataggagtgagccaccacacccggctgaagatgtcgttcttcacatttctttcaatg

SEQ ID NO: 1149 - DNA, 589 bp, Homo sapiens
  misc_feature 537: n = A,T,C or G
gtctcttaaccaaaatttgaatatctgggttcattaaatatagatgaatttgacttcttgaaggagaatgaggacttatacttgcaattgattttatttaaaaatagccaaaattcacataacatcttcctatcacatataagaaactatagccaatatatagatagaaaggtacacacacactcacacactacacacacacaatgctttaaaacaaggatagcctagccatagatagattagagctagaatataatttgaagagtattgggtagggctatagactaaaagtacacccaagtctatcaccaagaactgaaattcaacatttagccacgcttccctttggtttaattaatgcaaacacacagaaggaataatatattttattaattattgtgaattattaaaacattcctaacacatttttttaatttttaaagtaattcatgtttattgtaacatatcaaataatacagagatgtacaaagaaaaagttaacagtttatcctttccttctccaaccccatttctcanaaattcattgagtgcctcttaatcagctaagcatgttctagactatgtgaat

SEQ ID NO: 1150 - DNA, 482 bp, Homo sapiens
  misc_feature 256, 271: n = A,T,C or G
gcgggagcaagttttatgtctagctgtaggagttaggctaagttaaatgttgcaatgctatatatatgttaatagggatagtggaaaaactatcttacagccgggcgcggtaactcacgcctgtaatccccgcactttgggaggtcgaggcaggaggatcgcttgagctcacgagtttgagaccagcctggacaacatagtgagaccttgtctctatttaaaaaacaacaacaggtcctggtcgcggtggcaccancgcctgtaatcccancactttgggaggctaaggcgggcggaccaccggaggtcaggaattcaaaaccagcctggccaacatggcgaaaccctgtctctactaaaaatacaaaaattagccaggcatggttgcgggcgcctgtaatcccggctactcgggaggctgaggcaggggaatccttgaacccgggaggcagaggttgcagtgagatcgcgtccatgcactc

SEQ ID NO: 1151 - DNA, 591 bp, Homo sapiens
gctgcgagaagagacagaagggaagaccttttacattccatactgtttcttcttgtcatatattctatcatgaaggcacttaactttgttcatttctctttagctatttctctttagaaaatatgagcaagtcaaagactcttctctggctatgaccctagtatagactgagaatcccttatctaaaatatttggggtgagaagtgttcagatttttttttcccccaggttttgaaatatttgctaatactaagagttgagcattccaaatccaaaaatctgaaatctgaaatgctcctataaacatagcctttgagcattatgttggcactcaaaaagtttcagattttaggacattttggatttggaatttgggacgctaaaactgtattataaaatataaagcttttgtgggccgggtgcagtggttcacacctgtaattccaggcactctgggaggctgaggcgggcagatcacctgaggtcaggagtttgtgaccagcctgaccaacatgaagaaaccccgtctctactaaaaatacaaaattagctgagcgtggtggtgcatgcctgtgatcccagctacttggg

SEQ ID NO: 1152 - DNA, 517 bp, Homo sapiens
  misc_feature 155: n = A,T,C or G
ggcaaatggtaaaacttctcattttttcaataaaattaagtctaaagtaatatcacattttgcaaggaatttcaagagattatcccagtcttcaaagacatataggagcagtagtccccagtgtgccccttttaatttacctattgacacttggnggaaaaaacaggtgtattaggtagatgatggtggatatctctaaattgattcaaacagtagttccaatcatagctgctatacttgacctaatatatttactgaaataaatcaacaaagcctccgacatttggaatgtactatttgttaaatatattcttcttaattcccataaggaagatcaataataatttacatttaaaagggaagagaagcaggatacatttattctcttgttttgggatatgttaattctccctgactcctatcatgacgtttgcagaggcctttattactgatattctatgaaatatcatgctggtaaactatactgataatatcatgctaattggacctggtgagc

SEQ ID NO: 1153 - DNA, 595 bp, Homo sapiens
  misc_feature 522: n = A,T,C or G
ggacacacacactagccagccactctctccaaggcaggggagggggacaaaaagcaattttgagatttgtacagtgcttgccaggtccttcaaaaatgactaccggccgcccatggctcttgcacagcgggtgggaggaagagtccttgtaatccacctctcccaaggaactcctgcgcgaggtttcagattccccgcctgcaggctatggctgacttccccgtatcctgtgtgacgtgggatgtgtgacttcccgcagcccatcacctcacgctcaggaagggtgtttctgaagactgataaagccccttcagtgaatggcgccagggcacagctgtccacgacaaagtgaggatggccagataagaatagctccagtctgcagctcccagcatgatccacgcagaagatgggtgatttctgcatttccaactgagcctccgctggtgatacccaggcaaacagggtctggcatggaccttcagcaaactccaaccgacctgcagctgagggacctgttanaaggaaaactaacaaacagaaaggaatagcatcaacatcaacagaaaggacatccacaccaaaaccccatctg

SEQ ID NO: 1154 - DNA, 611 bp, Homo sapiens
gggaacttttgaaagtatagctgaaatgaaagaattttagcatgaatgctaatatacactcagcacctatattcttgctttttcatgtatttactcctgaattaatatattacttgttatatgcttttgaaagtaaactgcaaacaagtgcatgcttctcctagatctttccacatgctctgccattaattagagttcaatgttcaattttttccttttgatgtacaattaatacacaattaatttacacacacattttacttagttctgaaaaatgtatatacttttataactcaaagcccatcattatacaacattactatcaccctagcaaaatcttttgtgtcccttctcaatcaccaatcctgaccacaccccaagaaaactactgttcaaatttttctccatcattgattggctttgtctgttttagaacttcataaaactaaaatactgtagtaaattatgtacaattttatgactagcttcctttgctcaatataatgttttcgagatttattcatattgctgcatgtcagtagttggttctttttattgctgcatatttcattgaataaaaatgccaaagcttgtttattcataaaaaaaaa

SEQ ID NO: 1155 - DNA, 486 bp, Homo sapiens
  misc_feature 77, 366: n = A,T,C or G
tttacaatgaaaatctagttcgtatgattgaacactcacagaaagaacttcagaagactccagtgacccttcatganaagaacatgtctgcggtagccactggtccaaggagaatgaggaaatatgtagagcagctttgaacctaatcagcagtctgaagtcaagcccagtggattccagccaagcacagcagaaccacagccaatctatagaactatgagaggggaaataaatatttgtggctataagctattgagagtttaaacttgattgataggcagcaaaaactttcaaatcaattgttcttattaaacattttgcttttgttttgttttgtttttgagacggagtgtcactctcctccangctggagtgcagtggtgcaatctcagctcactgcaacctccacctcccaggttcaagcaattctcctgcctcagcctccggaatagctgggattacaggcgcctgctaccacacctggct

SEQ ID NO: 1156 - DNA, 653 bp, Homo sapiens
gctctgttctaagcactttttaatccacctaatcccatgtaacaaccctacttttatttatacctatcttgccaatgagaggccaagtcaatttttcaaggttacagagctattaagtggtagcactggaactctaacccagataatcttgctcaaaaattgtttttctaaacactaatctaagctgcctctcacatgcaactaggagggcctattgctatagaaaatatatttaaaaatggatacctgttgtagggatgatgtcagtcttgagatacttagagaacatcctcttggtaggtagcttgctggatgtgagtcttaagtttaagaaagatggctgggttaaagatacagatttaggagttgccaatctatgggattagggaaggtcgaacaagtaggtgagctcacttagtggttcccaaacactaatccacaggccatttcagatccatattgaagtttataacaactctttgcaaagcagatcaataaggattgttgaggagtttagtgcctaaattctcttttccccttatgtaattacagtgaatagagaatacacacaaaatatagtcattggaacttagctaagacctaaagtcaaatgggctctattactcactctgtacacctaaaacatacaatct

SEQ ID NO: 1157 - DNA, 556 bp, Homo sapiens
acagaggggggggggaggagccaagaggccgatagaacagctccggtctacagctcccagcatgagcgacgcagaagacgggtgatttctgcatttccatctgaggtttataggcagaggtcactacagagtcaaccatcgtggtttctgacaagccttttccagctctgcagtccagagatcctgaacacgatcatcttctctatgtaatttcccattcccttaaaattcccttggattcactttgcggagggcagaaaggtgtgcttgatatggtgttttcttcatctgaggccaaaagatggagcatcagggtagaaggagaaattcttagaggaagcaggaaagaggagtccgagttgaccactggatgtttttttctcctaataatggtgcccaaacttctttttcaccaaggctgaatggccatccgcaaaatctccaacctaagagacggtttcatctacttccaggcaaaactgacaatgtgaaaataccggagtcactgagcaaattcactccagcctgtgctgactgagacttacatcttacaatt

SEQ ID NO: 1158 - DNA, 454 bp, Homo sapiens
cagaaggggctgcctgggatagtcttggttatgggaactgtcattttctgctgcagcggtacgaaagaaggtgtacctctagcaaggaagaggtgaaggaggattcaggagatagtgagatatgagtgccaaagtgagttccttcagagagacatgctggtgtcagtcaatagtggtatggaaaacccaggagccttgggtttggccccagctctccccgcacccccctacttttttctttttcactcagagtctaactgttgcccaggctggagtagagtggcctgaccacagctaactgcagcctcgacctccaggctcaactgatcctcctgcctcagcctcctgagtagctgggactacaggtgcacgccaccacaccccgctaatttttgtagatcccagctctatcactacacagaaatgaactttaggcaagttattcaatggccct

SEQ ID NO: 1159 - DNA, 503 bp, Homo sapiens
acagagggtatttttatttatttatttatttttgagatgtagtctcgctctgttgcccaggctagagtgcagtggcgcgatctcggctcactacaacctctgcctcctgggttcacaccattctcccgcctcagcctcccaagtagctgggactacaggcgcctgccaccacgcccagctcatttttttgtatttttagtagagacagggttttatcgtgttagccaggatggtctagatctcctgacctcatgatccatctgcctcggcctcccaaagtgctgggattacaggcgtgagccaccgcgcccggcctctaaaagctttttaaatgccaaaattaggccagcactactcttaatgtttcagaaaattaagggaaccctcctaaagacattgttgcgatttcattcaggttatcagctgtagtctggggctagagaagtccaggtgtgccttcttttgaaggagaacatttcaaacagctgctgcaagcaagcatt

SEQ ID NO: 1160 - DNA, 511 bp, Homo sapiens
agaagggcatacactcggccaattatgctcttgaattcaccctaggccgggcgtggtagctcatgcctgtaatcccagcacttcggggggctgaggcaggcggatcacctgaggtcaggagttcaagaccagcctggccaacatggggaaaccccgtctctactaaaaatacaaaaactagttgggcatggtggcgtgtgtctgtaatcccagctactggggaggctgaggcaggagaatcacttgagcccaagaagcagaggcttcagtgagctgagatcgtgactgagatcgcgacactgcgctccagccctggcgacagactgagactccgtttcaaaaaaaaagaaaaaaaaagaattcaccctagattcctctgtcctgtgactttctgttattcaacccgggattttctttcctcttaatctcaggttgcagagttgctacctatttaatgttccacaatcttgagcaggttgcaatttttttttttaaatggagtctcgctgtg

SEQ ID NO: 1161 - DNA, 577 bp, Homo sapiens
cgacagagggggcaagtactttccaagtctactttctatgagccaagaccctatctattcgaaaaataatttcaactgtaccagaagagcccagtgcccagaaaccaatatcagttctatacagatacaaggtgatgctgattatttcatcaaccatcttggagttcccatcgtgcagtttgcttacgaggacatcaaaacattagaggctgaataggccggacgcggtggctcatgcctgtcatctctgccctttgtgaggctgaggcgggaggatcaccggaggtcacgagatcgagaccaacctgaagaacatggtgaaaccccatctctactaaaaatacaaaaattagctgggcgtggtggcgagtgcctgtaatcccagctactcaggaggctgagatagaagaatcacttgaatcctgcaggcgaaagttgcagtgagccgagatggcgccactgcactccagcctgggggacagcgtgagactctgtctctaaataaataaataaataaagcctgaatacaagacaattggattttcatacctgttcctgcattatcttttgtaatatg

SEQ ID NO: 1162 - DNA, 325 bp, Homo sapiens
ggcagtatgatccaccagccttggcctcccaaagtgctaggattacaggcatgagccacagcacctgggcttaatttttgtatttttgtagaggcagagtttcactatgttgcccaggctggtctcgaactcgtgagctcaagcaatcagcccacttatgccccccaaagtgctgggattacaagtgtgagccaccagactcgaccaaaaacaacacaattttaagacacaacttaaaacccacactctcttaattatatataactctagcctgcactcagattttctaattcagttttaacactgcattcaggctgggcggagt

SEQ ID NO: 1163 - DNA, 547 bp, Homo sapiens
gggggggaggagccaagaggccgatagaacagctccggtctacagctcccagcatgagcgacgcagaagacgggtgatttctgcatttccatctgaggtttataggcagaggtcactacagagtcaaccatcgtggtttctgacaagccttttccagctctgcagtccagagatcctgaacacgatcatcttctctatgtaatttcccattcccttaaaattcccttggattcactttgcggagggcagaaaggtgtgcttgatatggtgttttcttcatctgaggccaaaagatggagcatcagggtagaaggagaaattcttagaggaagcaggaaagatgagtccgagttgaccactggatgtttttttctcctaataatggtgcccaaacttctttttcaccaaggctgaatggccatccgcaaaatctccaacctaagagacggtttcatctacttccaggcaaaactgacaatgtgaaaataccggagtcactgagcaaattcactccagcctgtgctgactgagacttacatcttacaat

SEQ ID NO: 1164 - DNA, 570 bp, Homo sapiens
  misc_feature 445: n = A,T,C or G
gactcccctttttaaatagccacctctgtggcagtgtattccaaagtatacatctagtaatgccttcctacaggatgatctttgaaaataaatttaaaaaaaagctgctaaaatgtgggaaatactatttagtataatcctttccaagaaagttgctatacatattaatatgttaaatgtcctaaaaactaaattattccaccactttttttgttctctaatatctgtagaggtctcagagaaagctctgttatgagtgatatactttagaaatggaaagaatggtttgtttatgttaattatcctgattcatcattaaaatttaaattatgttaaaaatgtgtatttttatctatttgtaattatttaagaaaaaatctttgatctttccattaaaaatatttttggacgggctgggcgcggtggctcacgcctgtaatcccancactttgggaggctgaggtgggcggatcacgaagtcaggagatcgagaccatcctggctaacagggtgaaaccccgtctctactaaaaatacaacaaatagccaggcgtggtggtgggcgcctgt

SEQ ID NO: 1165 - DNA, 587 bp, Homo sapiens
atccgaacctcagatggagcaaactccagacacgcggcctttaagaactgtaacactcaaccgtgaggggccgcggcttcattcttgaagtcagtgagaccaagaacccaccaattctggacacagtaagtcttatgttttatatattgtaccacaataaaaaaaagtcaatttaggtaaaaacaaagtcaaaaggcagtgttggaaaatgtgcttataatccacaacacagacaaaagactaatattcctaatacctgtatactaactcctgcaggtctatatcttaatagaaaaaaaaagggtaacactaatacctacactacatagcacttttccattgccctaggtagtcttctaaaattgccttaagtaacatagttaatcctctccgcaactccatagggtacgtactgttattgtccccaagagaaatcaggcatagacagggtgggtcatttgctgacattcatagctgttaagcagtgaagctgagattcaaacccagccgttctagtagctctagagtccacgatcctaaccacctaactaaattatctatctgccttttttggaaacgtgcatgcg

SEQ ID NO: 1166 - DNA, 580 bp, Homo sapiens
gatgacaatagtttgggaggtggaagcagagaaagagacctgatgggcgtgtgggaaccctactattaaatagcacagagggaagaggaaccgttttaaggtgaaagactacagaataaagttttgagaatattatttaaagtcctgatggtaaccgatagaaaacctagaaataagattgtatctgactaaatatgggacaagtcaggaggagtgtagagtaatattgtgtgactgagcacaatccccacgtttggtagcccctgagatggactcccgtgatccctgacccgagctattgtaacactttgtaatcccatccgtttgaccatagaccagacttactgacttctaacagataggatacaacagaagtgttgagatgtcacttcccagattagtttacacagaaactttggctttatctgaggcacccactctattgctctccggattgctccaagggaagacagctgccatttgatgagctgcccacatgacagagaacaggccaatagccctcaaagaattgaaacctaccaaccaggggagtgagattggaagcatatattccttcgat

SEQ ID NO: 1167 - DNA, 577 bp, Homo sapiens
gtcaagtgagggttgccagatttagcaaataaaaatacataatgccgattaaactcaaatgtcagataaacaatgaatacttttttagtgtaagtatatcccctgcaatatttgggacacatttgtactaaaaacacaaatgtgttttaatatgaaattcaagtttgagtgggcatcatgtattttatctggcaaccttaaatcaagctgagacctgacaggcaagaaagagtttgcaggtagcaaaaacagaaaacagagttattgtaactagattgccagagagcagaaaatttaccagtgacttcctgaaataagacatcaatgctacatctgccacagaggaaaaaagaaaccgtacatatatgaatgattataatcctcgcccaaggcaggagtctcccagcacgccagaaaaggccataaatccatgcgatatccctgactactgcattttacatctaggactcagagtaactgaaagtgtctctgataactccatcatgaagcctctgctggtcctgccattgctccagatgcatgctggccactgtggctgccatcagcatcaccaccg

SEQ ID NO: 1168 - DNA, 605 bp, Homo sapiens
ggtgaagttatagacttgaaagagtataaaatctatgattctaaatatagtttcagaatgtttagatccttgtaaaaatatattctttccttttctttgtatattatggagtattcttgtgaggtggtggtcttcatgatagttgcacatcacaactaccattggatacatgtgcccaaatcctgctctgggaatttctacatctgtagctgtgggattgtgtctatgcacttatatgtcttgttctaaagagggttctggtatgtactgtgattgaaagacattcctgcaaggcagtgtttcatgaaagcatattctgtaggtcacctatgtcaaaatcacctggggtgttaaagtacaggtttctgtgccccatcctgaagcttttgaacctgaatttttgggcacaggtctcggaaatttgaatttttagtaacatctcacgctattatttgttgtaccaaagtttgagagccaccacattaagagagtatgaatctcaatctgtaattgggctgtgaactcaacttagtgtaggccacaacccgaatttaaaaagagaatgaaatagagaaaatatcagagtatgtcacatgtaataagga

SEQ ID NO: 1169 - DNA, 470 bp, Homo sapiens
ggaggctgaggcaggagaattgcttgaacccaagaggcggaggttgtggtgagccgagattgcacctttgtactccagcctgggcaacgagcaaaaaactctgtctcaaaaaaaaaaaaaaaaaaaaaaaaaaaaaaaaaaaattggttttcaaaaaggaaaatttttttttggggggggaaagttccaaaaaaaaaaccgggaaacccttttttttaacggggggatttttaaaaccaaaaatttaaaacttttgaaaaaaaaaaaagggggaattttccatttgggggaaaaatttttttttggaaaaaaaaaaaaaatttggggggaaaaaaaagggtttttttttaaaaatgggctgggggaaaaaaaaaacttgcaaagggggaaaaaaaccttttaaaaggggcctccaataaaaaaaaaaaaaaaatgtttttggtttcccgggggggggaagggggaaaaaa

SEQ ID NO: 1170 - DNA, 534 bp, Homo sapiens
  misc_feature 153: n = A,T,C or G
ggaaatgttagctgaatgaaagattttagcatgaatgctaatatacactcagcacctatattcttgctttttcatgtatttactcctgaattaatatattacttgttatatgcttttgaaagtaaactgcaaacaagtgcatgcttctcctanatctttccacatgctctgccattaattagagttcaatgttcaattttttccttttgatgtacaattaatacacaattaatttacacacacattttacttagttctgaaaaatgtatatacttttataactcaaagcccatcattatacaacattactatcaccctagcaaaatcttttgtgtcccttctcaatcaccaatcctgaccacaccccaagaaaactactgttcaaatttttctccatcattgattggctttgtctgttttagaacttcataaaactaaaatactgtagtaaattatgtacaattttatgactagcttcctttgctcaatataatgttttcgagatttattcatattgctgcatgtcagtagttg

SEQ ID NO: 1171 - DNA, 586 bp, Homo sapiens
ggtgttaacttatttgaaatgccttgtaaatattgagaagtcagaatacttgtttttagagttaagttgcaaataaattgactgccgatatattttataaatacattataactgacaggtactcagtgtcttttgttatgtagcagacataagaatgaagacttggagggctagattaaacttaaataattaaaaaccattcaagtcctttcctacagccatttgaggggaaacctaatgtaaaataagaagccgacatcatctctagtttaggtgtttagatttagtgaccacgggatggagaaatcacctggttaaagtcagcttgaagctctcgtgatggtttttgtttctaattagaaaaataggaataagtagtgtttcacagattctactatctttcttcaacagccttaacttctcattaggagcctaatatctacagtacttccttttttgtagattttaaaaaattgagatatatcctaatatagaaaagtatacagatcaaaaatatctagcttgaagaatgtttgcagagtacgcttgtacatgtagcacccagactaaaaaacagaatcttacc

SEQ ID NO: 1172 - DNA, 399 bp, Homo sapiens
gggtgtgcacttgcgatcttgattgacacgagtggcacccttttgcaaaagtaaattgccttgctgaggaaactaaatatatgtttgagtgctgtttcttttgtggcatcggaaattcatttataacaattttggtggcccgtacacggagagcccattctcctctggggaggggtctccagtactttcccgtgtggaggcgcgcccagtcaccttgttgcggtagcctcaaggtgaggaatcgaggcccaccaagtatgatgaataaacccagactctcagcaatgcaggaaaggaaacaaacgggcagcttgggaaaagggggctcacataccacagcgactaggtaaactctacacagaccaaggcatcacgtccagtggagtgcttgtcctgcaa

SEQ ID NO: 1173 - DNA, 452 bp, Homo sapiens
  misc_feature 313: n = A,T,C or G
ggaagtgattggatcatgggagtggatttcccccttgctattcttgtgatagtgagttctcacgagatgttgtttaaaagtgtgcagcacttcccccttcagtctcttcctcctgctcctgttatgtaagacagcgtgctggcttccccttcttctgccatgattgtaagtttcctgaagcatccccaaacatgcttcctatacagcctgtggaactgtgagtcaattaagcctcttttcttcacaaattacccagtctcaggtgtgtcttcatagcagtgtgagaacagactaatacagacatgatctctantgagagtgtgagaggccacagaaggcaataagtgatagcagtgatggttttcagtagcatgatgatagaagctgattaaggaagattcccagctacctcagtacacagtgccttgttgagttaaagaaatggggccacc

SEQ ID NO: 1174 - DNA, 630 bp, Homo sapiens
gggccctcctggggttaccctatgggtgtccccagctgtgcctatctagatgagcctcggagactccctaaggtcacaggactgtagtccctctccctacatccctgcctgcaaggttctctgagtttctagttttctctggttgtgtgggtcctccccagctgtcaaatcacctgctcctccttcctgcccaaccagctgcgggctgggaaacagtcactcccaatgctctagctgcatgcagactgagggtgggcaggctctgaaaaagggccaggggactcagagatacaaaagctttgacccaaagttttcatcatccaatcaaaccactcatagccacttttgtccgataaactcccagctctccttgtgccccaaacactcggcttattcactcactgcagtgagtgtgatactagctcactgcagcctccaactcccaggttcaagcaatcctcacgcctcagcctcctgcctagctgggaccacaggtacgtacctcctatgcccaactagtttttcatattttttgtaaagacagagtttcgccatgttgctcaggctggtcttgaactcctgtactcaagcaatcctcttgcctcggcctcccaaagtgccgggactaca

SEQ ID NO: 1175 - DNA, 552 bp, Homo sapiens
taataaaaggaacacaacctctgcttgaataagaagttaaaacacattagtgaaatttcagatctatatctacatatgacttcaacaatttattcacaataaaattaattttatttttctttcagactgaaggttagaaagaatggtgtaatatagccaaggaagatgacttaaaaaaatcagggtagaaaataaaataaaattatatgttattgttttcacaaaattgttctattcctaagaggacaaaacacattcatgtgtacatttctagagaatcaagtagctactttctataccttttcatatgcaaacctaacatacataaaatgaataactgatgcttatggtatatgtattttaaagtgaagaagaggccaggcacggttgctcacacctatcatctcagcaatttgggaggccaaggtggtaggatcacctgaggtcaggaatttgagaccagcctggccaacatggtgaaacccctcctctactaaaaatataaaattagccgggcgtggtggtgcatgtctgtaatcccagctactcaag

SEQ ID NO: 1176 - DNA, 452 bp, Homo sapiens
gattttctcaggtaattatttgcctaatgcctgtttccaaataatccaccatttccttacaatttaaaaatgctccagcatgtttttaatagctacacatatttgacacattttctggagaatttctgttttatttgtctatttcattattcttgtatcattatcatattatctcagtagctttgtggcaagtattaagatctactatgccaaatgtctattcactgtaccatttttcagaaaattctttttcaatcatctcatatttattcactcctgtagaatttaaaatcaacttatctagcccaacattaaacctcacaccctagaacaacaacatgtcgtagtaattctgactaaaattgctggaaatttatagatgaatttagggtgtattggcctctttatgatagaagctttttattcatcaatgtatgtttctccatttattt

SEQ ID NO: 1177 - DNA, 532 bp, Homo sapiens
  misc_feature 188, 369, 396: n = A,T,C or G
ggccctttcctccttccaccatgtgagaatgcagcaagaaggtgccctgtatgaagcagagggccctcaccaggcaccgaatccggtggcaccttgatgttgaacttctcggccttcaaaactgaagttttgtggccatggggatgctgacaaagattgcttgggatgcacacaaggcagcggcgaancctgaggggtgctgccaggccgggctctccactggccacggcctgaccgactgctattccagaggcatcacccgtcaggcctcaccggaaggctgcacagccggtgccacctcagagagtctctggcaagaggtcagcctcctctggctgctcctgcccttttgtggatctgctttcctantccaggtgctctgttcggagggctcanggacccttaagggaagacacctttcttcactctgactcagtacttttacactctcagctttttcccctctcactacccaactccccagcccctggtccacaacccttcaggaagcctttggttaggggccccctca

SEQ ID NO: 1178 - DNA, 598 bp, Homo sapiens
  misc_feature 339: n = A,T,C or G
gcatgtctaattgtaagtacctttgagacagagtctcactctgtcgcccaggctagtacagtggcacaatcatatttgctgcagcctctacctcccaggcttaagtgatcctcctgcctcagcctcctgaagagctaggactacaagcctgcaccaccatgcctgtctaatttttgattttttgtagagatgaggtctcaccatgttgcccaggctggtcttgaactcctggatccaagaaatcctcccaccttggctttccaatgtgctgggattacaggcatgagccactgtgtccagcctgagtactggcattgttaactgagggtgagacactanggctgaaagtcaagggccacaccggtgtttgagatgagtcaggctgggagggttccacggcaggtggtatagaaagagagcagacaaggccgggcgcggtgtctcacgcctgtaatcccaacactttgggaggccgaggtgggcagatcacaaggtcaggagttcaggactatcctagccagtatggtgaaaccccatctcaactaaaaatacaaaaattagccgggcgcagtggtgtgcacctgtagtcccagctact

SEQ ID NO: 1179 - DNA, 593 bp, Homo sapiens
  misc_feature 183: n = A,T,C or G
gtggttttcctatgctttgcattggcttctgcaaattaagtttcatttcccttttgaccacaaagaagatggccctattcaagacttcctcgttcataatgcctcagtttgttatccctccctcttccctcttcttcctgtacttcctgcttctcagtaatgatagttgttcttgtgatctantagagtggaaagagcgtagtatctgaataagaaaccagacgttgcaattctggagccacatctgactctgtgacttgggatgagacactccagccctcagcatctgcttcatattccttatttatataattggcacggccatctgtgtgtgtgtgtgtgtgtgtatggattcaaatattttaaaaaggatgtgagaactctttggaaaccataatacatgctgtgagtgtaaggtgtttttgaggtcactgtgaatttcctcactgagactcaacctaacaatggaaatgtcttcttgtcccactaaacgctcctgcagaaatacccagcttctgcttggattgagaactgtcactttctgacacttcttccttatattgtatcgatacaaggtttcgggcagtttctgc

SEQ ID NO: 1180 - DNA, 560 bp, Homo sapiens
  misc_feature 326: n = A,T,C or G
cagcagggtcaccagctgcatagggactaagctcaccagctgcatgacgactaaagtcaccagctgcatgggaactaaggtcaccagctgcatgggaattaaggtcaccagctgcgtgggcactaaggtcaccagctgcatgggaactacggtcaccagctgacagtgatgatggggaagggggcattagatacgttgacagaaaaaggcatgaaataattacttagagagatgaagcatgaggggaaaaaaaacaagaaagcataagagggctactaaagagcgattaagaggccgggcgcggtgactcacgcctttaatcccancactttgggaggccgaggtgggcggatcacgaggtcaggagatcgagaccatcctggctaacacggtgaaaccccgtttctgtgaaaaatacaaaaacttcaccaggcatggtggcgggcgcctgtagtcccagcactttgggaggccgaggcgggcggatcacgaaatcaggagatcgagaccatcccggctaaaacggtgaaaccccgtctctactaaaaacacaaaaaatt

SEQ ID NO: 1181 - DNA, 563 bp, Homo sapiens
ggggcaacctgttggggtcccttttcaagctgtggaacctttgttctttctctgtttgcaataaatcttgccactgctcactctttgggtccacactgcttttatgagctgtaacactcaccgcgaaggtccgcagcttcactcctgaagccagcgagaccacgagcctactgggaggaacgaacaactcccgacgcgccgccttaagagctgtaacactcaccgcgaaggtctgcagcttcactcctgagccagcgagaccacgaacccaccagaaggaaaaaactccgaacacatctgaacatcagaagcaacaaactccggacacgccgcctttaagaactgtaacactcactgcgagggtccgcggcttcattcttgaagtgagtgagaccaagaacccaccagttctggacacaatttcaagtcctcaggtgccatcaatattctgaaaatggcagtgatttttattcaacctgtataaggcactttcaccatgtacctggaagcaacatctacatctttttcagcaatctagatgctggggacacaaggtccacctt

SEQ ID NO: 1182 - DNA, 512 bp, Homo sapiens
atgaatgcatggactcaattaatgatcatatcagcttgcatttgtatattgctttataatttgtaaagtgatttcacatctatattcactataacagtttgaataaagaagaaattaacttcacatgttggattctgctttaaagctttaaagccactgatacgtcgttggcttaacgtgaatattaattatttaactaataaagtaaaaataagctagggatcaaaacagtggtttaaaagattatgctactattatttttatacaatctggggcagagttgatccttaaaccagaattccacctccaatgaatgtttactgttgtgtgattgtgggtgtgtgtgtgtgtgtgtgtgtgtgtgtgtgtgtgtaaacacacgcatgtatactgtagcttttctgttttccccagatatgtaaccaaaatatctagagagacacaatcatatatttataccagatctttggtgcgagtagctaatataccacccactgacccatctggacagt

SEQ ID NO: 1183 - DNA, 579 bp, Homo sapiens
acagaagggtgtaatagattcttgttttcaaaggatatagatattgagattctcaatgtatttgttaaaatacattgtttcttgttaaaagcataagactttgaaatgtctctgtgttgcagatatgtagatgttctgagccataatttttggaaaattctttcaaagaaaaggaaatctactggacaaatagcatgattaatggggatctagtgacaaaataatctgccctaattggatttgtgatgtttttgcaacttgaaattagcttcaaaatccaacaataatacgaaagaatgttcagtatcacgaatcaaattaaaaccataattaaatcacctcctttcattagggtagctactataaaaaaaaagtaaaacaaaacagaaaatagcaactgtcggcaaagatgtggagaaattggaacccttgtgaaaccatcccacagtgttgacaagaattgcatgctgggttctggacagaaatagttccaactaagtactaatcagtctgcacttgggcccacttactcgttgttaaaagtcatgtagccctggatgctgaccatgtacatctgca

SEQ ID NO: 1184 - DNA, 381 bp, Homo sapiens
  misc_feature 280: n = A,T,C or G
tactgtataaccagagtaagccacttctttgggcttcagctttctcatctgtaaaatgaagataatataatagcagtacttaactcagggttggtgtgaagaataagttagtttgtatatgaagagaagagtaacaggcagaatgtaagtgctatatttattggtttttagtattatttctagaaaatgattatttctgtttttcttaaaacctctaggtacagtcattttaaaaataaaagagttggccgggcgtggtggctcacgcctgtaatcccancactttgggaggccgaggtgggcggatcacgaggccaggggatggaaaccatcctggctaacaacggtgaaaccccgtctctactaaaaatacaaaaaatt

SEQ ID NO: 1185 - DNA, 543 bp, Homo sapiens
  misc_feature 445: n = A,T,C or G
ctgatgatttataatcatcttcaggttatgaaccatttaaagaatctgatgagagatattgatcctcttcacacattctctctctctctgcatataggcaagtgtgcgtgtgtgtgtgtgtgtgtgtgtctgtgtgtgtgtgtgtgtgtagtcttccatgcagttctgatggattttggagccaaaaagccgtgaacttgaaaataaccctaaacgataagctatattcatatcaacataaatttatggtggattaaaactttaaatctaaaatttaaatataaatgtcatctttgtgtgaatatagataaggtatcctaatctccaccctttgtttcttagtctggaaaaaaaactgggagtaatgatatttggcacaaagttttgtcatgattacacaatcacgaatatagctgggcgcagtggctcatgcctgtaatcccancattttgggacgccaaggctggcatatcatgatgtcaggagatcgacaccaccctggccaacatggtgaaaccccatctctactaaacttacaaaaaa

SEQ ID NO: 1186 - DNA, 487 bp, Homo sapiens
  misc_feature 409: n = A,T,C or G
gcttttcaattgtttggaatagtttcagaagagaggtaccagctcctctttgtacctctggtagaacacagtgataaatccatctggacctgagctttttttggctggagtgcagtggcgggatctcagctcactgcggcttacacctcccaggttcaagcgattcttctgcctcagcctctcaagtagccgggactacaggcatgcaccaccacacctggctaatctttgtattttcagtagagatagggtttcaccatgttggttagattggtctcaaactcctgacctcaggtgatctgcctgcctcagcctcccaaagtgctgggattacaggtgtgagccaccacgtctggccatctgagcctaagtcttaagaagacctgatcatttcaattcatgctcttangagtctatagtcaccatttgagtcttgctggagaaagcatgtgaaaaaaccacaaggagggagcaagtggaaaggaag

SEQ ID NO: 1187 - DNA, 582 bp, Homo sapiens
ggggcaacctgatggggtcccttttcaagctgtggaacctttgttctttctctgtttgcaataaatcttgccactgctcactctttgggtccacactgcttttatgagctgtaacactcaccgcgaatgtccgcagcttcactcctgaagccagcgagaccacgagcctactgggaggaacgaacaactcccgacgcgccgccttaagagctgtaacactcaccgcgaaggtctgcagcttcactcctgagccagcgagaccacgaacccaccagaaggaaaaaactccgaacacatctgaacatcagaagcaacaaactccggacacgccgcctttaagagctgtaacactcactgcgagggtccgcggcttcattcttgaagtgagtgagaccaagaacccaccagttctggacacaatttcaagtcctcagggtgagttttccccagctgagtgagaatataaattagtcacaggagtaccctgaatcactgtttggttggactagtttttctaggtgaacactgtgctggctgtgtggcacaaactcctgattggtcagactgaaatttccttgcgga

SEQ ID NO: 1188 - DNA, 665 bp, Homo sapiens
agttttagtagagacagggtttcaccatgtttgctaggctggtctcgaactcctgacctcaagtgatccacccgcctcggcctcccaaagttctgggattacaggcatgggtcactgcgcccagcctgaattttatgtactttagatacgtctagttttgaatgtagtttctcaaacagtaattataattagagacagcagcagccgttgcctttctctctgcagctttactgataggcactgcagtgtggtaatgttgggcacactggaatgaagagaaaggaacctagagaaggctttctggaggaataaccattaaactgaaacctgagaacatgaattagaattaagtcattcgtaactgttggattaagaggtggggaaagaaggagagagcatcagcaaaggcccagagacctgtgagagcactgcgattttgaggctggagaccatcgagcagaagctgtgtgggtggaggtggttggcaggaggtagttggtggtcagagagaaggctagaggtgagcaatcaaaagaacctttaagcatttcagatttttatcctaagtgcaaaagggataggtgtagtgtcttaaaagatcctgggtgggtgaagactcacatggtcaaattcagaaagctcacactgtctgcattgtgggttgg

SEQ ID NO: 1189 - DNA, 508 bp, Homo sapiens
gaggttcatttgcagaacagtttctgaatttgataggaagaaaaaagagcttctatgaagataggtggaaggcagacacataagtgtgtcaaaatgtgatcctttttaataaaaggtaagtgtgtatacttcttgattttttcatgaccttctgatgtttcaagtagtgttcatgttcttttccaatattagagaaaatattatttaatcattaacatttagtaatttatgtaagacataggcccagggtttcttcataaagacacgaagatttattgccttttccccacagaataatggatagttgaatgtgtgtgtgtgtgtgtgtgtgttggggggtatgtgtatttatatatatatagtatatggattgattattcgtagtttgaatgcttggcttcttccaatcaatgagtacaaaatcagcttgaccatttgtgtgagtgacaaattagaatttataacaaaacccatatagctcagatatttaagttactaattctagcag

SEQ ID NO: 1190 - DNA, 520 bp, Homo sapiens
ggggctctaaagggctaaaactgggattaaactagtagaaaggtcaacaaaaaatagattattacacaagtactgaaattcagtttccaatcaactcaagctttattgcattagggtaacatagtcttagatgaattgcctgccaaaagcaacattaagtggtatctggaggaaggcaccttcaagactctcaaattatcacaataattttttaaaaaacaatgtgtgaaataaaataaaaattactagacagacacaaggataagaacacataccaagcttaaggaatatgttatagaaacagacatacagaatacagaatagagttatcagaatggactataagataactggttaatatactcaagaaaacagaggacaaactagataactttatcccagaaatggctctatagaaaacagttaaataaaataaaaatcagaccaaatggaaaacagaaaattataataattaaaattaagaattctatagatgggcttaaaagcagctcacaaatag

SEQ ID NO: 1191 - DNA, 530 bp, Homo sapiens
  misc_feature 406: n = A,T,C or G
ggagaagaaatggtaccagctcctctttgtacctctggtagaacacagtgataaatccatctggacctgagctttttttgcgtctttctttgtcgcccaggctggagtgcagtggcgggatctcaactcactgcggcttacacctcccaggttcaagcgattcttctgcctcagcctctcaagtagccgggactacaggcatgcaccaccacacctggctaatctttgtattttcagtagagatagggtttcaccatgttggttagattggtctcaaactcctgacctcaggtgatctgcctgcctcagcctcccaaagtgctgggattacaggtgtgagccaccacgtctggccatctgagcctaagtcttaagaagacctgatcatttcaattcatgctcttangagtctatagtcaccatttgagtcttgctggagaaagcatgtgaaaaaaccacaaggagggagcaagtggaaaggaagaggtcctgaaacaacagagaagaatgaaagaaacaagtcaatcggg

SEQ ID NO: 1192 - DNA, 606 bp, Homo sapiens
  misc_feature 105: n = A,T,C or G
ccgtagccgcctggagaagtggccgcctggagaagctcagggctccacagcctgagacaaaggaatcatagttcttggacatcaagggcagaggctgatgcccanggtgtcagggtggccagcagccctgggcagagaagcgcatgtggcttcaccagtctccagctcttggggatggatgggacatgctgagtattatctgcgcagtgttttacacggtgagcccacggccaggatctcatttcatccccacagcccagggaggttgtcaaagtagctatgaatggccccctttgacacgggggaaaactgaggcttctgagtctcatccaaggccacctggctgagaaacagctgagccacagattaaagctactctttgcaccaaggccattgtttcctgcgatttgacaaaatccccccaccttggcagagggaactaaaattcctcatctctctgtaggaaagacagttatgtgcccaccgaacatagaggaatcatattgcagacgggccgtataaccttgccatgatacgacgaaagctgacggcatgtgtacgcaagcaacagccactcaacaaacatctcctaagctatcacacacc

SEQ ID NO: 1193 - DNA, 594 bp, Homo sapiens
aggtatttgatagatttagtggtagtggtgtgtggatatgagagagaaagagagaactactattaataataactgtttattgagaactttctatggaccaggcaccacgctgctaagtactatacaggcattctttagttaaattctctccaagcttataaaggcaggtgttgttactatccccattttacagacaataaaattgaggcctaacttgctagagacacaattttgaaacaaaatttgctcttaattatgatgttataatgcctagcccactcccatctttctcagaattttgttttataagaaaattatatcactgtttttttttaatggcacaaaatcctgagaccaacaaggataatgacaagaactataaatattgaaactcttacctattagacactgtgcttgatctcacacaaacttgcctgtacataaataataatacatattatgcccactttaaaaatgagaaaacagaatctaagatgttttaagtaacttgacccagctctttccaactgaccagtaaatggcaagttggagttcaaatacaaagctgctgatttcaatgtccaaaatcttctc

SEQ ID NO: 1194 - DNA, 610 bp, Homo sapiens
ttttaccaaactatccttgagaaaggctgtaccagttaatgttcccatcaatgttctacaaggagccccattttcccatttctgatgaatgggaatggcataacattgtaatttttatgtgcataaaactcattgctaaagagacaacatattttgcatttctgggggtatgtacccttcttttatcctttgcttttttccaattccagaatttctattacattccttttgtataatttctatccttttactggtattttctatttgttcagactgtgatctgttttcctttggctctttgagcatatttaagatcactgatttagtctttgtccagtctcttcaacaaatggtgctgggaagacaggatatctatatacagaagaatgaaactagacccctatctctcaccatatacaaaaatcaagtcaaaatggattaaagtcttaaatcgaagacccaaactatgaaactactaaaagaaagcattgggaaaaatctccagcgctggtctgggcaaaaatttcttgagtaatactccacaagtacaggcaaccaaagcaaaaacggacaaatgggatcacatcaagttaaaaagcttctgtaccgc

SEQ ID NO: 1195 - DNA, 603 bp, Homo sapiens
cagacggggaggctcagcttacctgcagcagccacagcagcagcactagaagcagcagcagcgaggggtgcctcccggatctcatggccatatgggaatacccaagacagacccagaacgtgcagctgatgaccagtcctccaagctggtggtctcaccggagccacacacctccttctcagccagcagcttcttctctaaaggttttcaggtcactttggcccagatgctttcatcccatcttgctcctcccttttcagcttttcttgcatttatcagagtggggtgggctgacttgtaagcttgaacatacgtttgccacaagtagagttcctaggaagggtggggtagaaactaaagccaccatggtcctgcacgtacacaaaagactggctggggtctgacctcaggaacaacagctcagccagcggaagtaaaaccagcacctatcggaaagcagaattatttgtttctttgtttccttgtttgttctggtttccaaatagaaggtccaatcatctctttctatagcaggatatgttagtgactattttctataatcttatcctcttgaaccaaaaaaaaaaaaaaaaaaaaaaaaaa

SEQ ID NO: 1196 - DNA, 592 bp, Homo sapiens
attccctatcatttttattatctgtattaacagtcccttagattaggatttgtatttagtgactactttaggacactaaatataaagttactaaaattatttttctttataatgatattattaagtaaattttaaataaagtgattagggccgggcacagtgactcactcatgcctgtaatcccagcactttgggaggccaaggcagatcgatcacttgaggtcaggagtttgaaactagcctggccaacatggtgaaaccccatttctactaaaaatacaaaaattagctgggtgtggtagcacacgcctgtagtcccagctacttgggaggctgaggcaggagaatcgctcgaactcgggagctggaggttgcagtaagccgaaatcacgccctttcactccagcctgggtgacagagtgaaactctgtctcaaaaaaataaataaataataaataacaaataaataaataagtgattagatcttgaatgttacaaacagtaaacatcacttaccttgaaattttctgtgatcagagtgaacaacttggtggaattccccacagcacaagcagtatttgacattattatt

SEQ ID NO: 1197 - DNA, 566 bp, Homo sapiens
ggccctttcctccttccaccatgtgagaatgcagcaagaaggtgccctgtatgaagcagagggccctcaccaggcaccgaatccggtggcaccttgatgttgaacttctcggccttcagaactgaagttttgtggccatggggatgctgacaaagattgcttgggatgcacacaaggcagcggcgaatcctgaggggtgctgccaggccgggctctccactggccacgaatttgtacatatggctttggaaacctcatccaacactaagtaatgaacatacatgaggatactatgtatttttcaacctgcaagcccaagatttcaaattctttggtttatcgcagagaacacatctctcaaattgtcttcaaggagcactgcaggagaaagtcctggcaacttggcgcagcgaatttgatcagcaccatacgtacgacctgtctcaggaacggagccatgtgtgtgactaggactgcaaagcagctcgtgttcgtgggggaaatgacaggcacaggaaggaaaagctgagaacactgaaacggttcctaatcgtgcagtggggaaa

SEQ ID NO: 1198 - DNA, 671 bp, Homo sapiens
  misc_feature 254, 535: n = A,T,C or G
atatctaggaaaccacctatatgttacaaagaaagaatactttcaggtcacgcacgatgactcatccctgtaatcctagcactttgggaggccgaggtgggcgaatctctcgagcccaggagttcgagaccagcctgggcaacagggtgaaaccctgtctttacaaaaaacacaaaaattagctgggtgtagtggcatacacctgtagtcccagctatttggaaggctgaggtgggaggatcgcttgagcccangagacattgcagtgagcagagatctcactacactccagcctggacgagagagtaagactctttctcaaacaaaagaaagataaactttcacaatcagaaaatagaaaatacggcattcaagcaactgcctcattctcatcctaaacgatttcactgcactgtggacctacactaggttaaatacggttacaatttcaaaactgcagcagcagtcaaggccacccagctactccagagttcagcctcagcaggaagggtattcaaacccactcgcacactangtctttagctctaagtacagtgtcagtttaaactccagttcttatatgttctggaggtcagaatttggaaatgcttatctttacgtagattatataatttactcaactaaatcttaagcacaaatagttttatact

SEQ ID NO: 1199 - DNA, 520 bp, Homo sapiens
ggggcttgttttgcttctactaaaatggttctaggtgctgtgtggacaggtgatacaaaagcctgactcacacggttgacattcattcattccattttcatttctctttgagtgatcctgacaagcagagggtctcaggtggatattactgtgtctttgagacctctctaatccttatctatctctcattttaatacagagagtttcatacgcagaccttaagtagacatagtatccagctaaaagggtctcactctgtcacccaggctggagtgcagtggcgcagtcatggctccctgtaacctcaacctctcagactccagcaatcctcctgcgacagcgaagttaatcttctggttcggttcacaaagtgcaggagagcctaccagcttgagagaaaaggagtcatgctgtatttgtttccttgagtgaatggccactcagctgctgtgtttctccctgcatgtggctgaagtttacattggagggtgacttcctgattgccagttagcatatgtgt

SEQ ID NO: 1200 - DNA, 494 bp, Homo sapiens
aggggagggatgtgtgagcaagcaagcatcaggtccggccactgcacatagctgctggctgcagtggggtgggcagctccagtctccagcacaagagccagctccttgcgaggctacagctggaccagacatcccacaagcagcttccacagatggcactagggaatgcagtggcacccaggagcttgaaggcaccaggaaccacagagccccaaagagggtgtcacagtcctggcttggggaactcctagatctgggctccctgaaggactgcagctcttctctccttcttgtcacccacaacatgactttgcaccacagaatgtccaggatatatcaggaaggagcaatgagaaatccataggatgagccacacagaataagagctgagtatattgactgacctataggattatgcaaagtcaaaattcagttcttcatatacagaaaagggaaattaccctgagaaggtaatagctgaattgaatatataa

SEQ ID NO: 1201 - DNA, 590 bp, Homo sapiens
actgtgtgggaggtaaaggggtaaatgggaactctgtacttaccattcagtttttttttctctaaatctaaaactgttccaaacaacatattttattttaatatggtaaacatgcaaaggcaaaccctatttcctgtacatagtggatgtctgataaatacatggtacatgaatgcatgatgggatgagtgaagaaatgaactgcgtgataatgtatgtgaaagtaccatgtaaacaaactgcctgacaaatgtggggggaaaagctagtgaggaaaaatggaaaacaagtcatgaaaaacattcagtgtaaaagtttgagaaggcataagaggaatttgaactaaagactgaaactattttaaactgtttaattttcagaaaaaaataatatagtttttattaaataaaaagttgatacctatgctttcagagtctgtgaattagagacaccatcttgacaccaattacttctcatattaatttggttttgttctagaggcttcagcttacaagtttcagaggaggtccttctctaaaggagttttttgtttccttcattgtttaatatgggcaggtttccgtaatctc

SEQ ID NO: 1202 - DNA, 553 bp, Homo sapiens
gggaagtagggcccaatctgtaagactgtgactcaggagatccttctttgtgtctctgtcatttaagacatgggaatgaccctttacctctctttatctaaatcagattaggtcattgcagcctacaggctgagttacaataattttctttgtctacctccaactgagtaaattgcaccatgttcttcctggaaaacatgaccactaacccagtggctgttggtttggccaattagaaatgagactgctggaggtggtataaggtgctctgtcctctcttaactgccaatgggccacacctacttatccaggtcactagggcactcaagtcaaaagaagtgcctgggagaaaatggcacatttgggtgatggtctcgctggctgtttactgtatgctgagtctcttaggagaccgttcactgcctggtaatcatctgctttctgaattctggaaaatatttctctgtggatgaaaatgggtcaggattctgaactttgccacacacacacaaacacacacatacatgcacgcacgcacacacacacactattt

SEQ ID NO: 1203 - DNA, 567 bp, Homo sapiens
cagatgtctcagtctatactcccccaccccttctacccctctgtcctgtcttcctagctgcctctttccctctgctgtgctctccctgtgtccctaactagccctcttaggtcccctttcacttgttcccatctttttctgaaaaggggcaatagaaatgaacatgacttatcaaatttggaaagctggtaatagttttatacacacatgcacacacacacacacacacacatattcttcatctcctctcatcttttctccccgtctctgtccctgctatttctctggactgactgccctccctcttcttcatttctcacgctcttcattctctttcctcttcccagatctgtttcaggctatcgcctcctccctttgacaagacaggagtgatctgagctcccctcttgccatctgcaggaatgagatgcctgagtagcccaagaggatgctgccaaggggcacagcagagttcgccttgaagccacagactggaccttgaattccaacccatctgcctgatcagtcatcgatgctccccatgcctcagtttatcaataaaatgat

SEQ ID NO: 1204 - DNA, 564 bp, Homo sapiens
acagaagggggacagagtctcgttctgtcgccaggtaggagtgcagtggcgtgatctcgcctcaccgcaacctccgcctcctgggttcaagcgattctcttgcctcagccgcctgagtagctgggactacaggtttcctgcaacctcactgggcattttcagaatgatctgtacaagcgttgactgaatgattgattccaagttcccccttcctaggatttcagacctcctcttgacaagtgatgaatgggccatcttaatcttgtttggatcagaaaggaccatacaactgagctttagacaagactaaaaataccaaaagtagcagtctgcaattttatgtgcatgtggcttgaagctctgacaacaacacaaaagattcccaaatgtggtactcattctacctggatataccagaggattttgtgggaataaaaggatgactgttttttcacttgaataattagatggagtctagctccgtcgtctaggctggagtgcagtggcgtgatctcagcttactgcaacctccgccttccgggttcaagtgattctcctgcctca

SEQ ID NO: 1205 - DNA, 601 bp, Homo sapiens
ggccctttcctccttccaccatgtgagaatgcagcaagaaggtgccctgtatgaagcagagggccctcaccaggcaccgaatccggtggcaccttgatgttgaacttctcggccttcagaactgaagttttgtggccatggggatgctgacaaagattgcttgggatgcacacaaggcagcggcgaagcctgaggggtgctgccaggccgggctctccactggccacggcctgaccgactgctattccagaggcatcacccgtcaggcctcaccggaaggctgcacagccggtgccacctcagagagtctctggcaagaggtcagcctcctctggctgctcctgcccttttgtggatctgctttcctagtccaggtgctctgttcggagggctcagggacccttaagggaagacacctttcttcactctgactcagtacttttacactctcagctttttcccctctcactacccaactccccagcccctggtccacaacccttcaggaagcctttggttaggggccccctcaagagtgagatgacccccacatctgtgctgatcctcctgaccctgaaccgtatgggtgcattgttccaag

SEQ ID NO: 1206 - DNA, 461 bp, Homo sapiens
gaatcctgtcaagcctgggaaccaacgcctttccgtcgccagttgagctctacgttttggccagcagatggcgcgatagaagcgccagtgtctccgttccaggccccggacatttgttaaacgtggcgaaactgttactcaagatcccaaactctagagctgatggatctcagattctacccccttaagctgcgcgcggtggctcatgcctgtaatcccagcactttgagaggccgaggcaggtggatcacttgaggtcaggagttcaagaccagcctggccaacatggtgaaacctcatctctattaaaaacacagaaattagcctgatgtcatggcaggtgcctgtttccagctacttaggaggctgaggcaagagaatgtcttgaacctgggaagctgaggttgcagtgagcagagatcatgccactgcactccagtgtgggtgacagagcaagacta

SEQ ID NO: 1207 - DNA, 327 bp, Homo sapiens
gcctgggaaccaacgcctttccgtcgccagttgagctctgacgtttgggccagcagatggcgcgatagaagcgccagtgtctccgttccatgcccaggacatttgttaaacgtggcgaatctgttactcaagatcccaaactctacagctgatggatctcatattctacccccttaagctgcgcgcggtggctcatgcctgtgatcccatcactttgagaggacgaggcatgtggatcacttgatgtctggagttcaagaccagcctggccaacatggtgaaacctcatctctattaaaaacacagaatttagcctgatggcatggc

SEQ ID NO: 1208 - DNA, 556 bp, Homo sapiens
atttgtactatattttgtttcctttttatgttttcgaacacttttaacacaagggagaaacaaactatgaagcgatgtaattacatgttcaccaggtaataatataatttattaggaagtatgaatgccatgcacagcctctacaggtgtgtgagctggtaatggacatagtttgttaacttcagacttccttcctgttcgagtgtctctgggactctgggtctaacttcactaggcgatcacgtcaaaggtctaaatctgacgcctttgacgaatgtggagttggggccaaatgtcccttctgtctctgcctgtgacattcccttcctggccctgcctgctaccagctgggtgaccttgtgcagggagctagcttctcttggtatcacagcccccaagtgtaaaatgccacattgaaacctaccttagcttggtttgggggaattccttgaagtaacaactcatattgttcatttgactgagtggttttgcattagtaaatgctcaataaaggccgagtgccgtggctcatgcctgtaatcccagcactttggga

SEQ ID NO: 1209 - DNA, 533 bp, Homo sapiens
taaccatgtccacggcgcccgccattctgtagcctatgctcggagggcacatgagcaagagcttgaccatctgtaccgttggttgacttgctctgttaagggctatgatttcaggtcgtcctgcgtgtgagaggagaagttggcgagctccagcgtatggtccacggagtcttgccctgttgcccaggctggagtacagtggcgcgatctcagctcacggcaacctccgccttccgtgttcaagggattcccctgcctcagcctcctagtagctggaattaaaggcacctaccaccacgcccgtctaatttttgtatttttagtagagatggggtttcaccatgttgcccaggctggtcttgaactcctgacctcaagtgatctccctgcctcagtctctcaaagtgctggaattacaggcatgagccaccacgcccagccaactctcaccacttctatttgatacatgctggaggttctagccagggcaactaggcaaataaatgaaataagagacatccatatggaaatga

SEQ ID NO: 1210 - DNA, 590 bp, Homo sapiens
gggctgcagggacctggattcttagtatttcaggctgctgtcccttttttttttcatttcctttttgtttttgttgttgatgtgaccgcgtgtccacaaccctgggattccctcgccctcagattccaaaatccaatttcttggatttcagtgtttttaaggtgggaggtctcgctatgcttcccaggctggactcaaattcctgggctcaagtgattcccccgcctcagcctcctgagtagctgggactacagatatggcatgtcagtctggtggtctagccagaggaagactcctggagctggtgaactgtgcatggatatgcagtcacgggcagcccacctcctactcctcaccctccctgtgcctgtgagggtctgcactcaccctggtcttgctttattgcccaggctggagtacagtggcgcaatcacggctcactgcagcctcaacctcttgggcccgagcaatcttcccaccttggtctcctaaagtgctgggataacaggcatgagccaccacatctggctgaggccccacattttcattttgtgctgagacttgtaaattaggtagctggtcctggctgt

SEQ ID NO: 1211 - DNA, 584 bp, Homo sapiens
  misc_feature 468: n = A,T,C or G
agaaggggatgcttaactcaatgggaagaggcataaaaatattgcattaagagcctgattctggagttggtcccatgactcccaaagattgtggaaacaaggcaattaacttttttaattatgcaaaccattcagtaaagtaagcagtaaaatatattaaataatttatttaatacttctaatattctcagtaatgttggaaatttccaaataagcaaaaaaactttagctaaatgtgtaaactcagatttttccttcaaatttttctctctgctgaatataggaaaatatttccatatccatatcactgctttcaaaactgctagataatccattttaaataataagatttttataatatgtgattcaattagaaaatatcttagctattttgagtcttggtcacaaatattttaactgcaacacaagtcacaacctttcctcctgccccctagggaatatttattntaattatgcctgccaattgatctaaattattgaacttgctcaaacttgcttaagaattagaagcttccttggatacagtaacaaattaaaataaaatggaaaataattttgaaatt

SEQ ID NO: 1212 - DNA, 532 bp, Homo sapiens
acaaggtctattttgggagttttaatgtttcattttatttcatttctatagtaatttctcacaatcaccaataattttcttatcttagtttattatatatgtgttgtcatgaagaaacaagctttagatcatacctgaccaatcagtactttgtatgaatattttacagcaaggaaaacaaacaaaaaaatgatatatatatatatattttttttcttgagacggagtttcgctcttgttgcccaggctggagtgcaatggcacgatctcggctcaccgcaacctccacctcccgggttcaagcgattctcctgcctcagcctcccgagtagctgggattacaggcatgcgccaccatacccagctaatttttgtatttttagtagagacggggtttctccatgtaggtcaggctggtctcgaattcccaacctcaggtgatctgcccacctcggcctcccaaagtgctgggattacaggcatgagtcaccatgcccagccttaaaaaaaatgatattcttaaggctatact

SEQ ID NO: 1213 - DNA, 572 bp, Homo sapiens
  misc_feature 499: n = A,T,C or G
gaggctgcagtgattgcaccactgcattccagcctgggtgacagagcgagactttgtcttaaaaaagtaataaaattgctgcaaaacactgtggtatgctggagtcagacatcggtcatcatggcagtttcatttcatgatgatgtcactcttgccatgcaacaggctatctgcctacaggcatgctctggtgctatggagaagtgcgtgtgagtagtccttacctgcgcacactaggtgttcactgagtacatgcatggaggcgcatgggcagcattctcacctcagatggagcagctctgaggctttgactctgagctccctagtgggatctggtgccagttgtccatgaacgtcccctgtcctggcttccctctcctccctgtctcacttccccactcccctacacatgcttcttgggatctcctcccacataaatcacttgcgctcgaatcctgcctcagagtcttctcctgggagatgaaggaggcagcccggngcgggcaacacactgaggttggcagagtgcaaagatggcaagagcccgggtccacggtgacactgttagggaa

SEQ ID NO: 1214 - DNA, 498 bp, Homo sapiens
gggaatctaaagaaaggcgtctaacaggcagaaccagatctccaggtgtgaagtaggcaatctattttcacttgctattaacagcaaacgtacaactttatctcttatttgacttcattatttggctttcaaattaacaacatgaaaactatacagaaattagtctgtgccctataagacagagatttagataatttgttcaaaacatgagatgatattcagatattctctcaaaggcaggactccaacaccgcaggtggaaaaccaacaaaaggaagaaaacagaaaggtgggggagataaggagtagccaggaaaaagaaaatagtgataaaggaagagccaaaaagggttgcactgtgtcactcagggagtgcagcgatatcggctcactgcaacctccgcctcccaggctcaagtgatcctactgattcagcctccgaagtagcttggactacaggcgtgcgtcaccgtgcccgtttattttattgtagaaacg

SEQ ID NO: 1215 - DNA, 623 bp, Homo sapiens
gtgacagagaacaggccaatagccctcaaagaattgaaacctaccaaccaggggagtgagattggaagcatatattccttcgattaagagttcagatgagaagacagttcctgccaataccttgattgcaaccttatgagaaatcttgaggtggagacctagctaaaccatgcctagattcccgactcacagactgtgagataatatactaaaaatacatcactaatttagaataaaaatcaaacaagctgtcgaagaatgtgcacaaaagttgaaaaaatattacaccaaagatgatagacaaagcacggcaatccattctaagaaaagaggtatttgcaagggcaaattagaacaaatggagccaaagcaataaattaagagaggaaaatttttgtaagctataaaaatgatctgagcttgtagtcaaaaggagtcaagatattgcatgcaacattgatgagtagagacccatgcttagaaatcatctgaaaaaaagtattttagaaataaagggagtaagcctgtaaatgttcaggaagaatacatggaattgatattttttaaaataactaaaattcattctcctccatacactggccacaaaaaagtgaagcaacttt

SEQ ID NO: 1216 - DNA, 656 bp, Homo sapiens
ggtacggctgcgagaagagacagaaggggtaatcctagcactttgggaggccgaggtgggcgaatctctcgagcccaggagttcgagaccagcctgggcaacagggtgaaaccctgtctttacaaaaaacacaaaaattagctgggtgtagtggcatacacctgtagtcccagctatttggaaggctgaggtgggaggatcgcttgagcccaggagacattgcagtgagcagagatctcactacactccagcctggacgagagagtaagactctttctcaaacaaaagaaagataaactttcacaatcagaaaatagaaaatacggcattcaagcaactgcctcattctcatcctaaatgatttcactgcactgtggacctacactaggttaaatacggttacaatttcaaaactgcagcagcagtcaaggccacccagctactccagagttcagcctcagcaggaagggtattcaaacccactcgcacactaggtctttagctctaagtacagtgtcagtttaaactccagttcttatatgttctggaggtcagaatttggaaatgcttatctttacgtagattatataatttactcaactaaatcttaagcacaaatagttttatactgtgatctacctcttgtctacctgctc

SEQ ID NO: 1217 - DNA, 459 bp, Homo sapiens
tgtcagacaagttaactccttcttgagcctcaggaaccttccacaggagggcttatatggctcccacaggtctctctgtctttcttcttataacttacattttcctaatatgaagtagtgtttggtaaactataacgatatttcatcttcacaaacccctataatacataagaattactggccgggcgcggtggctcacgcctgtaatcccagcactttgggaggccgagacgggcggatcacgaggtcaggagatcgagaccatcctggctaacacggtgaaaccccgtctctactaaaaatacaaaaattagccgggcgtggaggcgcgcgcctgtagtcccagctacacgggaggctgaggcaggagaatggcgtgaacccgggaggcggagcttgcagtgagtcgagatcgcgccactgcactccagcctgggcgacagagcgaaactccgtctc

SEQ ID NO: 1218 - DNA, 495 bp, Homo sapiens
  misc_feature 385: n = A,T,C or G
gcccagccattcatcttttcttctcccctactgaccttcaggaccattaatgcttcaagatgttatgtgagttatgagtttctaatttatgttcagtgaactcaatatattctaagaaaagaggagtaatcaatgtgactcattctttgtaaaatttcaaaacagcataagaaaaccaattcaagaacaaacgaaatattgccaacgttctctgaagtatgaaaaacttggggatgactaagacttctttctgtacatgtcatatttgctcttctattgacttacctatcaatacccatggcagctggaagtcactcagtttagattaaaagataaaattggtgggcgggcgcagtggctcatgcctataatcccagcactttangaggcagaggcgggtggatctcgaggtcaggagatggagaccatcctggctaacacggtgaaaccccgtctctactaaaaatacaaaaaaaaaaaagttacccgggcgtg

SEQ ID NO: 1219 - DNA, 512 bp, Homo sapiens
  misc_feature 372, 396: n = A,T,C or G
gggtcgctgccgccttgcagtttgatctcagactgctgtgctagcaatcagcgagactccgtgggcgtaggaccctccaagccaggtgcgatataatctcgtggtgcgccgttttttaagctggttggaaaagcgcagtattcgcgtgggagtgacccgattttccagtgagatgaacccggtacctcagattgaactgcagaaatcacccgtcttctgcgtcgctcacgctgggagctgtagaccggagctgttcctattcggccatcttggctcctccctcaggagtgaaatacatcaccgctttccctgctcccgccgccattaaaattgtgtttggcatctgaccaccaagatacagatatttcctanactgttttgcagctaggtacttangtaagtactgccctgagattgaatttaaaccaacgtatgtaagcataaatattgtgtccaaattgtgtacaacttcttggtcatccctttaaaactaaacctgttttcccagcact

SEQ ID NO: 1220 - DNA, 537 bp, Homo sapiens
taaacatgagaggggagggtgtgatagattaacctaaacatggagtcttcatattaataccaaacaaaaaaatcagtcactgtcattgataggtttttcattaacatcaccattgaatgaccttcccactttctaggtgaaaattgacttttttaccttaacaaattgaagcttgatgtttttgtttagaaagccaggccaaccatatctacctcttaatttgttgtgaggaggaaatgaatgagtgtgcacaaagtgtctggcacagtaagtatgagttcatgtcattctccttttccttgcaactagtatgagataggtgtatagtagacactcagtaactgcttctggagtgaatggctcatctgaccatcacacagttgcattcaaaagggaaataatggtctgaaatctgaacaattctacatctgagtccattctgtaaaacgtattatcgtttgcttagtttagttttagaagacttattttgagtgtgtcagataaaggaaaggtggagctaaacagcatttccttaat

SEQ ID NO: 1221 - DNA, 551 bp, Homo sapiens
attaaacttttgttagcagcaagaagtacatattgcctcttcatgaaggaatttcagtctttgttctctgtgctgacctgatattattaataaatttttttgataataattacctatcagcactttaaattcatttcccattttaaagctgaggtatacacgcacacacacaggcacacatacacagtgtacaaatatatatatatatatttgcttgagtgttaatatatagcccaaagcttactgtcccctatgtagcaaactaatgctcactagtggaagtgaaatttggcaagggatcttaatcatcaagatgatattctcattcatttaaactttatatctctgcaaaattttgtgtttctaatgaccttgaacttgcaaatatattaaaggtgttgtttccaaagggatacagatggaaattataattttcatgtcagggtccacactggccaaatatgtcccagaattcctaagctcagtgttgcacgtagcatgactggacatgactgtgaaaatgtttcaatgtatgccccactttgagacgc

SEQ ID NO: 1222 - DNA, 550 bp, Homo sapiens
  misc_feature 489: n = A,T,C or G
ctaactttagtcacatttgcaaagtcattgttcccatgcaaagtaatagattcacaggttctgaggattaaaatatgaatatcttggaggggggcattattctgcctatgcagaattttaattatactttccccattttccttctttcttgactgatttttgtcacgatttggaaaattataaatttcccaagaaatgccaggaaggaatttccatatggaaacatggcaatacagcctggaaaacactatggacagttgcatggacctcacagtaaggaaatctaacataagcttcaggctggggagagctttatagacaatggatgtcataaataggtttttgaagaatatgtagtagttatctttgtgaaagttaagggaagagaggattggagccattaattcacaggactgtgattaaactgagacatacacatttcatttttaaggggaagttaaaaatagtttagtatgagttcaaatgtangaggagagggatataaaatttgagagttaagcattggaccgtgtaagtctattctcatgct

SEQ ID NO: 1223 - DNA, 537 bp, Homo sapiens
agttaattaaatgtttaaggaacatttcaccagaacagtatgacagtttggatggtatgtatacccaaataacatagcctttaaatatctaaacaaagcaaacagaataacaaggagaaactgacaaattctcaatgggaataggtgagtttttagcatatagtcatgcactgcataatgatgtttgagtcaacaatggactgcctatacaatgatgttcctatgagattataatggagctaatgaggataattcccgtcatctaatgacatcataactatcttaatgatatagcacaacacattactcatgtatttgaggtgatgctggtgtcaacaagcctgctgcattgactgccagttgtttaaaatatagcacataccattgtttgcagtacataatacttgaaaatgataataaactagtatattgctgatttatgtatttgctatactatactttttatcattattttagagtgtacttccactgatgtaaaaacaagttaactgcaaaacaacttcaggcaggcccttt

SEQ ID NO: 1224 - DNA, 492 bp, Homo sapiens
gcttgttcttttggccgaacggcctacggctgcgataagagacagaaggggcggttccgtgcctgctccaactctccgtgaggcccctctcccagagcctgacacactctgtggccgaactctaggcaggtgcccctgagtcctttcctcgacgaggcctgaccccatccccatcctcgctgggcccgccgaccccggtgttagcaagaatcctctaaatcagtttatggagaattacccacccttgatatctgatcccattcctcatctcccacccttgatctcatcaccctgccggcctcctgcaagatcctcattgagccactccagtgagaatccccctaccctcgaaggccgccctaacaacttcccatccgctgacccctccaacgccatcaatctccagctgtggttgttgaactcggaggtgagctcctctcaccactctcttgaataaagcttttctcaccattttaaaaaaaaaaaaaaaaa

SEQ ID NO: 1225 - DNA, 581 bp, Homo sapiens
agaagggttcaccactgtgtctgtagcactgagcacagtgcctgatataaagtaaatgttcaataaatatttattgaaagagtgaataggtaaatgatgggacctaaaaaattgtggctaatcaaagacaagaaatggtttagcaacttatgatttccctacagttaaagaatcattgtctttttgagacatattcttaccagatatcttgtctttgcaacccaagagaaagaacagaattccaatatttgagatttaaatatgtttactattgcctaatgtctaaggtcctttaagagtaatctatcaagtatatgttagcataccttctttactatcatttttctgagttcaaatttacagatgcactgtatcaaatcacagtaaactacagtgatgttggctgtctgactgccttttggcatcctacaaattatattaataggtctccgagcaactgtggaaacttgataactgtagccagaatgacctgagcattttgattctaattcctaatactaatttacttacagccatgtaacccatcaatgtaatcaggtctcatctaaaggatggtgatg

SEQ ID NO: 1226 - DNA, 575 bp, Homo sapiens
  misc_feature 306, 322: n = A,T,C or G
ggaccctgggttcgagggggtgactctgaagtttcagataaagccggactccagcctgcagatcatccccacgtacaggtaggggccggctggggccaggccgccctttctcccagttacaacgcaaacaccagtgtgggaggtaggggtgctccctggcgtcggtgtggaccctcacctgtgctctacgttacacgtggcccagtctctggttgacaacttgagctggtgccagatacagtcctgccgctcctgactcagtggctccccactcccagtgtgagacctggtctctttacgaatcangcctggccttgcttangctgcagctgcggctgcggtgatttttcccaataatgctaacagctactatttgttggtagtgacaacaataagaggttaacaggcagtattttatgtgtatgggctcattcaaaagcctggggaggccgggcacagtggctcacgcctataatcccatcactttgggaggccaaggcgagcagatcacctgaagtcaggagtttgagatcagcctggccaacatagtgaaaccccatgtctactaaaaatac

SEQ ID NO: 1227 - DNA, 626 bp, Homo sapiens
  misc_feature 523: n = A,T,C or G
ggcctacacttaaaatgaatgcacttaattgtatgtaaattatacctcaatgaagcagtttttaaaaatggaaaaaacgatttatttcgcataaggattcctccacaagtttcctttaaataacaaatcctattcccaccctcggagcatttaaaatttcatattccatttttaaaaataaaaggactcattcagagtttttcaacagcacatctgtgaaacaacataatgtacacctacctgtgtaggcgtgcacattcacacacccacccacgtgtgcaaacacactcacaggcacacagctgagccaccttctcctgtctcctgtgatcaaaatacaataatagcaagataaacacatccaaaatgtaggtttgagagtctgctgaattatttaaatctgtctgtgtgtttgtggatctgaacttcctcatatataaaacaagataattagaccaaatgttatagaaagccttttaatgaacttaatgacctaaatgtccatgaataggagactgcttanataaattatggtacatcatatggtagatcaccatgcgagtcctaaaaaagactgaaaaagatctaaatgtaccaactgatagggaactagctctgtgatacat

SEQ ID NO: 1228 - DNA, 457 bp, Homo sapiens
agaagggctgcacccaacctgaattctttttctttataacacttttcactatctgacattacatatatagctgttacatttttaacggctaattattgaataattactaagtttcaggcattgttctaaagctttacactaataaccacattattcacaacaaccctattaagtggtactactaggttttttttttttttgacaaattagaaaactgaggcaaaaggggtaaagtttggggaaagccatgtggttttaaaataccgggattgggaattaaaactccaggttgtctaaactttaaaaataactaccttatttggcctgtcaaattttttggtaaagttggtaataaaaaaaatattttttaacaaggcatgggggtttatccctgaaatcccacccttttggaaggctggggggggggaattgtttgacctaaggatttaaaaaccag

SEQ ID NO: 1229 - DNA, 532 bp, Homo sapiens
aaagacaaagagcgttagtaaaaaaaacaaaaagcaaacaaacaaaaactggtggaatccgcacagcctggacttaattaatattttatacagtcattccagaagaacagctccttcatgttatatatatacatgttagccgggtgtggtggtgggtacctgtaatccagctattcaggaggctaaggcaagagaatcgcttgaacccaaaaggcggaggttgcagtgagcccaaaaggcagaggtcgctccagcctgggtgacaagagcgaaactctgtctcaaaaccaaaacaaaacaaaacaaagaatgtatatatgtgcgtatatacagataagaaagtaggccgggcttggtggctcacgcctgtaatcccagcactttgggaggccgaggcaggcggatcatgagatcaggagttcgagagcagcctggccaatatggtgaaatcccatctctactaaaattacaaaaaacaaaattagccaagcatggtggcgcacgcctgtagtcccagctactcgggaggctg

SEQ ID NO: 1230 - DNA, 569 bp, Homo sapiens
ggtgtgtttgcatatatatatgtatgtatatatttattatttatgtatatagacattcctatcattgtcagaaaaagattaaaaagggacttacagtgggacacatatctactgaataatctttgaagtttgtggggaaaattaggtaataaaaaaagcaagatttgcaaagcagttctgcaaagagaggttgtagtaataaagagcctgtggcaaggtcctgccttggtagaggaggatgaaagtaggccttgtattttctagtaacttacataaagagagaaaaaccacatttatgggatttttgtttgctaggagataaaagtcaactggttgtttaggaaactcagcttttttttgtagtaagcagagagagaaattagtctctaatctcaataagaagacaaggtacaacatcatgaaactgacttcagtacctcccttgcagcaattactgtgacctagattgcttttagaaagaatacagtgaaaatgtgagtcactggagatgtagactaaactattgctaattcagttgtgtgtgacaccactgtttattaaacgattat

SEQ ID NO: 1231 - DNA, 348 bp, Homo sapiens
gtaaggtagaaatgaggaagaagccattttcctgcagttggctgtttctgttggccaatatgatcattgccggagacatggggtttttctgaggcagaatatcagtttgttttgtcttgttttgttttgttttgagaaggagtttcactcttgtgtcccaggctggagtgtaatgacacgatctcagctcactgcaacctccacctcccaggtttaagtgattctcctgcctcagcctctcaagtaactgggattacaggcacctgccaccacacccggctaatttttatatttttagtagagatggggtttcaccatgttggccaggctggtctcaaactcctgacc

SEQ ID NO: 1232 - DNA, 444 bp, Homo sapiens
  misc_feature 389: n = A,T,C or G
ggtggaaatggatcattgtaaagtctacatcctcactgtcctcacattgagtaagctgaggaggaagaggaggggttggtcttgctgtcacaggtgacagaggtagaaaatccttgtataataagtgagctcatgcagctcaaacccatcttgttcaagggtcaactgtacttgaatggatttttttccctgtcataattaaccacccacacacatcttactagaccaaaaagaaaacttgtcaagcaaataatctcccatttcttgggtcatttggagagataacacaggccaggttatatgtcctgaaagatgagaatgtgtgaagtccccagagagtctgatacgaggccttcttccagggagtagtggtctggccgctgcaccancctgccccctgccatgccctgactcacctgcacatcatgggtgctgctgatgccc

SEQ ID NO: 1233 - DNA, 623 bp, Homo sapiens
ggatgccatttcagctacagtgttcacagtgagtttaggctttggcgtgtctttcggttttgtgtttttgtttgcaggagatcattaatggagcagaaactcaaatctagcttttgcattcctaaccctgatctccagtagataatatctctgtgccatagtgtatgaaacactaaaaagtctcttgaaggcttccctcatggatgagtgctatttgatgaaacattttttctaccctgtctgttttttgagagaggattttcacctagaatatttacattaccatttgcttacaagaacatatttcttattgtcataagataattactttttaaaaatggttccctttactgtagaaaagtatgttaaaaaatatatcattccatttacttgtttgctaattatcttcccatttgtctttcaaacttttcatttaactttatggcgttatttcaaaaatataggtgtggtcaggtgcagtggcttatgcctataatgcaagcactttgggagactgaagtgggaggatcacttgagcccacgagttctaaaccaacctgggcaagatagtgagaccctgtcttcacaaaaaattaaaatcagctgaccatgctggtgtgcac

SEQ ID NO: 1234 - DNA, 532 bp, Homo sapiens
ggggacatttggacttttaagtttactgatacgttttttcagaaaagcagaaaaatcaacaacatggtttcaaatacttggatgaggctccattcactcccttagcccatcttacatatattactgcattgactggaaatgggaggcacttcacaattaggaatattgtcaggtcagccaggcgccgtgggcatgcttatagtccaagctactcacaaggctgaggcaggaggatcgcttgagcctgggagtttgaggctgcagtgagctccagcctgggtgaaagagaagaccctatctcaaaagataaaaaattttaaaaacctgtcaagttagatgttaaagaggacatgtaaaataaaatctccctaacatgtttatgaaatagctgcaaaaggctgagcgtggtggctcacgtctgaaatcccagcactttgtgaagccgaggtgggtggatcacctgaggtcaagagttagagaccagcctggccaagatggtgaaacctcctctctactaaaattacaaaaatta

SEQ ID NO: 1235 - DNA, 543 bp, Homo sapiens
gactatatagcagcaaaagaaagccaagtcagctactcactttcatcattaaacacgaacatcattactcacccttgtcagagtcaagacgtaagataatatataatgccaaacatatcagacaatgacataaagagagaatacagttaaacagaagaattttccctacaagagaaagataatctgataatagacaagaacttaagaaaatacttctaaattaggtagtatacttggggacattaaagaagttattatctctataaagcaagaatagggagcattcagagacaaaatatttttaatacaactattaaacacagtgacatctgttgtattatcaatttctgtgtgataaattaccccaaaacataatggcttaacacaaaaaaaatttatctcgactttttggtggatgaaggactccagagcagcttatctgcgtgggtctcggttggagtctgtcataaagttgcagtcaagatattagccagtcatcagaaagcttaactggggctggggaacccatttctgtgcccactc

SEQ ID NO: 1236 - DNA, 323 bp, Homo sapiens
gatccctttccccagcctggaccttaaatcccaagtctatatccacctagagcaactacctactatggttcctttgtgtgtgtgtgtgtgtgtgtgtgtgtgtgtgtgtgtgtgtgtgtgtgtgtgacacaggcacaaagaagaaggtctcctgtttaaactatagagtgactatattattacattctcgctctgatataaaaaaatactagactctgtgttatatataaaaaaaatatgttcaattgtctcatatttgtgcacgctgcacaagacccatggccagggatctctcgagacacttacatttatggaagaacgca

SEQ ID NO: 1237 - DNA, 454 bp, Homo sapiens
gagaactaaatcttttttttttttttttttaagtaaaaaccccttttgcagcacaagggggaaattcagtgaaaaccttcctggaggttgggggaataaggaggttctaatatgggtaaggcttttactataaaccatccttttgcatacatatagcatttaatcccccaataactttttaggtaattattattataactatccccttgttaccaaaggggtaatcaaaactcaaaaacattaagggatttagggatcaccctgcaaataactagcaaaccgggctttctaacctcactttggtggttgccaaagcccaccctgtttccactgcctccaaaaaataaaaacaccccaaattaaaattcctcacaagctcaaccgggcacgggggctcacacctataatcccaccattttgggagggggaaactggaggattacttgaggccagg

SEQ ID NO: 1238 - DNA, 583 bp, Homo sapiens
  misc_feature 390: n = A,T,C or G
gattttaggttgggtgtgatggttcaagctggtaatcccaagtgctggaattacaggcgtgagccattgcgcctggctgctgtgggctgtcttaagaagtaatgcccgatatcctggagtctagaccactccccactacacccccactcctaaccagttgaatcagaaatttctttcttgctataggggcctctaagtttcagtgttgtgaatggtaaagtgggactggagctgtgaggtgttgagcctttgagacagcccccgagcacatctgacttagcacctgtataggtgtagaaacgtatacgcctgtacaccttctccttttgagagggcttttctgttgtgttgtggttccctgtccccagtttattcatcttctaactttanggtgtttctgtctactcagccatttaaaactcttatgttggttagtgataggactttaaagcctttatagaagtccatgcaagttcattcagatacatttcataaatacctgtttacctaaaggctaaaaactggcatgctaagtctagttgtgttaaccccacattcctagtcagaaaggaaacaatagagc

SEQ ID NO: 1239 - DNA, 474 bp, Homo sapiens
tttgccaaccatgaacaacaacaacaaaaagaatagttggccgggtgcagtggctcatgcctgtaatcccagcactttgggaggccaaagcgggtggattacctgaggtcaggagttcaagaccagcctgaccaatatgatgaaaccccatctctgctaaaaatacaaaaattagctgggcgtggtaaagcacgcctgtactcccagctactcaggaggctgagacaggagaatcgcttgaactcaggaggcggaggttgcagtgagctgagatagcgccattgcactggagcctgggcaacaagagcgaaactccttctcacagaaaaaaaaaaaaaaagggccaccttcagtagctggtccctccaggatccatgcctcattttgggacattcccatgcctgggcaacaaagggaaaccccatctttactaaataactgaaatcccttctttactaaaaaataaaaaaaatt

SEQ ID NO: 1240 - DNA, 452 bp, Homo sapiens
gtctaaaaagcaagttaaccatcatctctctccttgcctgggaaaagaagcctttatctaagtagccaaaagatgggcaaggctgaccacccagtcatttcggctgatcaggattttccaaaaaacaaaaagctctctgttttcacaactgagtgacaactcttaggaaatactaccagcttactcagtttgagtaaggccatggagaagtctggtgacagtcagttgcctggatgcacatgttacacatggctaacgatgctgtcaccactgggagctttcagaattggagaaaataacaccgtgtctcttgctttctgaacatggaatttttaactttttttttttttttttgaaaacaaattctccctttgtcccccaggctggagggcaggggcataatttaagttaattacaacctccacctccggggttaaaacaattttcctgcc

SEQ ID NO: 1241 - DNA, 573 bp, Homo sapiens
ggggaggctcagccactgatgactttaaggcatgcaggtctccagcatggctgcaggaaaactaagagaacttgtttctagtagatctacccttaaagaatagctaaaggaacttctccaccagaaagaaaatggtaaaagcccaaagctgagattttcagagcagggagaacaggatgagtaaaaatagaagtaaacatactagactattctttatctcatgagcttctttcatcatatgaaagaaatgttgatgcagaagttataatgacatctgatggtgctggtcagtgcatgtggaagaaatacttaagataattgtattttaaaactggaggggatacagagatctaaatggaggtaaggtctctacacctcactggaagtggtaaaacattgacaccagtaagctgtgataagttacctatgtgtatggcaatacttagaacaacccctaaggaaactgtgtacaaagcagtgtactcagaaacattataagtaaatcaaaatgcaactctaagaaatgttcaaggccagttgcagtgactcatgcctgtaatcccagtgctctgg

SEQ ID NO: 1242 - DNA, 542 bp, Homo sapiens
ctacttttctgtagttggaagttagaaacatttgattcttagtagtacccgtgttaaattttttgggggggcctacaaagtaatagtttatatgttttctattagtaatttcctttgcactatgctttattttaatcaagtttggaattgagtcaaagtcacatcataagcatactggaaaacctataagaaattgtcagctgccatagattgtctcatatccctcactgaggatttgctttcattcttctgatactccaaaccacttttaaaaagctttcccagtcttggaatgccttcttaaaagtgttcagtgtcacttaaaaatatatatacaaatgattcttatactaactgcaagcttttttatcacatttggaaggctgttttcttgtaatacagagagaaaaagaaggcagagggctcctttttagaaaattaatagtggtgttttcctccctttttctcatatactatctctaaagtcttcagacatttattttggccgggcacagtggctcatacctgtaatcccacaactt

SEQ ID NO: 1243 - DNA, 517 bp, Homo sapiens
agctaagtcatggttacataaacagcagaggtgctctttaaatacacaaagaattcaggcagccagtttaaaacaaagttacaggcgtgagccacgatgcccagcctgtctgctatttatagataaggaaatccaggctcagggagattaagtaactctcctaaagtgacatggcttgccatgggagaagccacgccttgagatcagctgtgcctggttccaaaccctcagttctttccttggaatgtaatcactgctgtgatagagggatacttcttcaattaccattcattataaccatagtcaatcaatgttaagttagtgtgtatttgtttgtaacaaggtagataggattataactctgctcctccccctgctagaggaatgatagactctcacagggccttacaaagtccattcttctctatttcttccaggtcatttcttttaacgccactacctttcctctttagccttctctacttactaaatgaagcagtggtaatgctgttgctcg

SEQ ID NO: 1244 - DNA, 559 bp, Homo sapiens
  misc_feature 194: n = A,T,C or G
gagactccccaacctggtgtggctggaggacagtgtggattaggcatttccctaacacaaacaggttcttggcaacagcgtcagggactttctaaagaacacactgtacacaagttttaaagcatcgattttgtatctttatgcgcctggccaggcacacttgggaacacgccttggttctcagctagacttangagttgcaagactaggctctgatcaggctatgtgagagctgggagaccctggcaagcacttaatagtatcagacatgcctccctgtgttgattctgtgagcatcaaatgagatgagtgagaaaatactctgtaagccccaaggcaatgcagaaatgcaggggggtgtttactacaattattagaaaataacggctgggcgcggtggctcacgccggtaatcccagcactttgggaggccgaggcggtcagatcacctgaggtcggcagttcgagaccagcctgaccaacatggagaaaccccgtctctactaaaaatataaacttagccaggtgtggtggcgcatgcctgtaatcccagctactt

SEQ ID NO: 1245 - DNA, 563 bp, Homo sapiens
agaaggggaccagtagctggaactacaggcacatgccaccacacccaagctaatttttgtattttttagtagaggtggagtttcactgtgctgccaaggcttgtctcaaactcctgggctcaagtgatccgcctgcctgggcttcccaaagttctgggattacaggcatggatcactcctcccagccccaagcagattttatatcatgatactttgggccagccctcttctgatataaatggaatgcttagctgtagatattgagagattatcctgtttccaaagaactctcacttatccctatcatttccagttattctccattcaaaactggctgggcttgctgtcttaatctatttgggctgctataacaaaatattataaactgggtggctaataaacaacataaacttatttctcacagttctagggactggaaaatctaaggtcaaggtgtcagcagatttggtgtctagtgatggtgtacttcctgattcatagacagcactttcttgctatgtcctcacgtggctatagatacaaggctctggggtctcttttat

SEQ ID NO: 1246 - DNA, 641 bp, Homo sapiens
  misc_feature 385, 500, 517, 540: n = A,T,C or G
gcttgttcttttggccgaacggcctacggctgcgataatagacagaagggtcacgcctgtgatcctagcacattgggaggccaaggcgggtggatcaccaggtcaggagatcaagaccatcctggccaacatggtgaaaccccatctctactaaaaatgcaaaaattagtcgggcgtggtggcatgcacctgtagtcccagctactcaggaggctgaggcaggagaattgcttgaacccaggaggtggaggttacagtgagctgagatagcgtcactgcactgcagcctggtgacagagcgagactccatcgccccctctcctcccccaaaaaagaggaactataggcaaagatttgctccatcacctaagcccaacaggcttangtctccagagctgtacctttagtgttttcaagacatctcctgtctccccacttcagggactacttagaaataccaatgggaggccaggcgcggtggctcatgcctgtaatcccancactttgggaggctgangcgggtggatcacctgaggtcangagtttgagaccagcctggccaacatggtgaaaccccgtctctactaaaaatacaaaaattagctgggcatggtgacaggcgtctgtaatcccagctactc

SEQ ID NO: 1247 - DNA, 561 bp, Homo sapiens
  misc_feature 478: n = A,T,C or G
acaagaatacctacataatctgacctatagaaagaaaggaggattttattgtccctgaacagaggctcagggacaaataaaaaataacaaatctaacattcacattattgtaatctggaaacattcacattattgtaagaggacaaagaggtctttgtgggataaaactgtgaagaattaatggctgaaaatatatcaaatttgtcaaaagatataaaccagatttttaaagttcagtaaatgtcaagcaggataaaccaagagaaacccattgcaagacatatcataatcaaactgcggaaaattaagaaaatacaaaacaattttgaaagcagccaaagggaaataaaagataaaataccaaatgaatgattgtagatttctcatcaggaacccaggagccagaaaaaaatgtcataacattcagtaagtaccaaaggaaaaatacattatcaacccagaatggtatgtggagcanaagtatcttccagacataaaggcaaataaatacattctcattggaaggtaaataaatacattctcagtcctagcaaaactgct

SEQ ID NO: 1248 - DNA, 503 bp, Homo sapiens
actcaatagactgaatcttcaacttgcaacaatggctttgtttttgacatgtgtcaatttcccttttgctttccagctcagctatatattttaagtgtgtctatgtatttgcagcagatagaagtgattcctttcaccagcttagtcatttgtcaagagtttctgtgcacttgtcttcattcctgtagggcattaccctaacccaaaacattatcatttcttccccagactaccagtaccatcttctaacttgtctacctgccttcattctaacatgtccaccatcttttctccaccctgcagcaaatgttttgtaaacaccaatctaagaacattatctcttggatgggcatggtggctcacacctgtaatcccagcactttgggaggccaaggtaggtggatcacctgaggtcaggtgttcaagacagcctggccaacatgatgaaatcctgtctctactaaaaacacagaaattagctgggtatggtggcatgtgcctgt

SEQ ID NO: 1249 - DNA, 117 bp, Homo sapiens
tgatcgcaccactgcactacagactggacaacctatcgagaccctgtctgaaaaacaaaataaaacatctctcaagaaactgttcttgcctgggcatggtggctcatgcctataatc

SEQ ID NO: 1250 - DNA, 556 bp, Homo sapiens
agggacaggctgaagcaggaggatcgtttgagcctgggaggctgaggctgcagtgagctgagatcactctggcctgggtgacaaagtaagaccctatctcagaagagaaaagaaaataacaaatatgatgatagaaaaaagtttaacagaagggttagaagacaaagttgagaacatttcccacaaaaagggacaaaaaagaaaaatggaaaaatagaataaaagataagaaaattagaagacaagtctagaagtttcaacaacgtgattgaaagtttcatggaaagacaacaaagaaaatagggaaaactattaatgaatgcaataaaattttcttttctctttgttttttttaatttttttcatttttttttttcatttatttttttgaaatggagttttgagttttgctcttgttgcccaggctgcagtgcaatggtgtgatcttggctcactgcaacctccacctcccgggttcaagtgattcttgtgcctcatcctcccaagtagctgggattacaggcatgcaccaccacgcccagctaattttgtaatt

SEQ ID NO: 1251 - DNA, 560 bp, Homo sapiens
agaagggttagatcaatcattgtccttagaaagcctacagtataatcaaatatcattcaaaatatagtctttgtggtcctagagtttattgaacattatctaacagatatttactgaacacagactttgtgctggggacaaagtatacttcagtaagtagaatgcaaatatggtatcttatttaatctgatgggattttaatttaatctttcatgggctttctaatatgatggtaaagagagactgtacacaagtaagcaatgaaatacatatataatttaaaactgtgataagctattataacttatcatgtttagtgttagaagatggcatgagagacatacttagatgatatggtcaaaagaagcctctctgtggaggtgacagtacatttaatctgaagattgaatatttagaaggaatgaagtgtggggcacagaagatcatgccaaatagaaggaagagaatggctgaaagcctctagtgggaaagacattatatagaattcaaggaattgggccaggcgcggtggctcatgcctgtaatcccagcaatctggg

SEQ ID NO: 1252 - DNA, 578 bp, Homo sapiens
ttttgggaattcatacgtcagttccactactagttccaataacaaactcattaaagttcaaatgttttgcaattctttttgtccttagaatacgttccagtgagtatagacagttaagatactctgtaaactggaattaaaaactgagattactttttattaatatcacataaagtttatttccatttgtattcagttttagggctctccccatctttattgatttaatttttgaatgtgaaaaacagtaacatttttttccatttcacaggaaaataatttagtgctcattacagctcatgatgtgctgttttattaaggtttgagtttatgctgttactatcaatgggggtcttttgtttgctatagcattataataatcattatcatttgaaaatgttggctgggtgctgcggttcacacctataatcccagcatttggggaggccaaggtggggagattgcttgagcccgggagttttgagaccagtctgggcagcataatgagaccctgtcttaacaaaaaaatttttaaaaattagttgggggcatggtggcacatgcccgtagtcagtctt

SEQ ID NO: 1253 - DNA, 586 bp, Homo sapiens
  misc_feature 117, 168: n = A,T,C or G
gtacgtctaatatcttcctgtatctgcccaaagtgcccagactgcttctacctctgaacaggcttgcctgggtttcttccctgttgtttcagtgaaaggcactggtgcccatactanagggtgcaagagaatgatagcggcgggcggcagttaaatgcggatccctangccctgcccctacgttctgattcagtaaggccaataactcccggcgcatctcagacttttctaaggccccccaggagaggtgagagtcctctgtagaagtgtaaataattctaggtcttgaaaaagacatggggccgggcgcggtggctcacgcctgtaatcccagcactttgggaggccgaggcgggcggatcacgaggtcaggagatcgagaccatcccggctaaaaaaacggtgaaaccccgtctctactaaaaatacaaaaaaaaattagccgggcgtagtggcgggcgcctgtagtcccagctacttgggaggctgaggcaggaaaatggcgtgaacccgggaggcggagcttgcagtgagccgagatcccgccactgcactccagcctgggcgacagagcgagactccgtct

SEQ ID NO: 1254 - DNA, 602 bp, Homo sapiens
cagaaggggtgacatctggttattacataatggtgatcctgagtagaagacaaagactatatagcggctgggcacaatggctcatgcctgtagtcccagcactttgggaggctgaggcaggaggatcacttgaggtcaggagtttgagatcagtccgaataacatagtaagaccctgtttccacacaaagaaaaggtttttttaaaattagctgggcatggtggcgcatgcctgtagtccaaatactcagtaagctgaggcaggagtatcacttgagcccaggagttcaagaatagcctgggcaacatagtgagatcttgtctctaaaaaacaaaacaagaacatatagttacaaaccctccttttattatttttctttcaacttattgggaaaacaatatctatcatccagcttaaacaaccatcaatatttcactatacttgtttcatctaacactccctatgcctctcccccactttttcttggctagagtattttaaaataaatcccagacagtatatcttttcactcctccccacaaaacctaaggctgcatctttaaaataagaacatttgataaacaactattatttagcagtct

SEQ ID NO: 1255 - DNA, 585 bp, Homo sapiens
cagaagggaggtgcaaacattagacgatttcattttgggcttctgatacactcctgtccgagaagttacctttgaaaatgtgtactattttattgtcaattatgttttctttaaaaaaaatttatgacagattacttttgctaattatgtgtgtgggcagattatgttattcatgaattttatttcaggaccttggtaaggggttacacaatatttcttttgaaacgagggtctcgattattgggcttgagtatcctgatctaattaatgcactgggcagagctggcagacgtgtgggacacccagctattctctggaagggaagggggatataagagacacactataaaggtgaatggtaatcggcatctccccttcaaggggaccaggaggatctgagctgactgggtgcctttgtggaagtgtgttttgaactgagattagagagatcagcaatgtatctcttaaagtaatccaggaggagttcattttcaaccgattcagcagtggaacacttgaagaggaggaagtcaaaattcaaaatgggttgggtgcagtggctctctcctgtaatctcagcccttt

SEQ ID NO: 1256 - DNA, 566 bp, Homo sapiens
acagaagggatatcaattagaaaagccccatgctctaaaaacaatagggaaaggtcctgagcagacaattcacaaaagaagattccagatattcaaaaacatgtaggaaaatgaatatgaagacatgcaaataaaaatatcattgtcataatgtgttatctagcaaactggcaaaacttgaaatccttcacttgaaaaagtgaaggattgggaaccaagattctaatctaaacttctagtatccttctagaagtttaaatagttgttaactttatgaagagcaatttggaatatgagtgaagacaattaaaagattgggtgcatgaatatgtatcatagtttcattaaacacttcaaggaattggaaaaaatctctatgccctaatgtgatattaaaacatgattttgggccgggcacggtggctcatgcctgtaatcccagcactttgggaggctgaggtgggcggatcacctgaggttgggagttcaagaccagcctccccaacatggagaaaccctatctctactaaaaatacaaaattagccgggcatggtggtgcatgcct

SEQ ID NO: 1257 - DNA, 599 bp, Homo sapiens
ttgttcttttggccgaacggcctacggctgcgagaagagacagaggggccttcgtgaggacaatgtgctatctggagaaaccactttattttcacataagtaaacatgttttcagaataaatcctcttgacattgtaatatttttggcatccattgctctttctttataatatgaaaaatagcatactagacattgtgaattcatgcacccagctgtttactttcagcgaggacccgagaatttcccatacagtcaggaaatatttattagccatgtatgatatgccaggtactatggtagatttagggtgtgttttctcaaccttagcactattagaattttgggccaagtagttcttggttatgggtggttgtcccgtccattgtagaatgtctatcatcatccatgatctttacccactaaatgggtaatggcagtttcaccctatcctccagttgtgacaatcaaaaatgtctgcaaacattgtcacatgtccccagggggacaaaattatccccaggtgggaaccactgacttcagatatacagggattaattagacaattcttgcactacacatacgtttacctaggaataca

SEQ ID NO: 1258 - DNA, 345 bp, Homo sapiens
atttctatattgttcactgctcctgtcatgcactctcacttcatggtcttatattgttagctctactagttagtggaataaaaatattatttaatttctacatataatctcaagcattaccatatgccaaaatcttacatatgaataggaaaaaaatcacagcacagtacatgtggccatcactatcatctcattttatagatggggaaactgagtctcagagaggcaaggtaactggctaataagttcgaacactgtttttcccaagactatttgactcaaaatacagaggaagtttggtgtgtgtgtgtgtgtgtgtgtgtgtgtgtgtgtgcgcatgcttat

SEQ ID NO: 1259 - DNA, 507 bp, Homo sapiens
attgtatttaatctttacaaagactgtttagtactgttattgtttccatcttacataggaaataactgagtgttttgaacaaaaataaattaactttgttctccacaagtattcaatgttttagataactctagttaggtatcactgagaatcagccttgctataggtggcatgtattatgatgaatccaagtctccacatgaattattgcctcctagttaacaataaatggatacaaagacagtcatacaacctattctgtatatatgattaaatcccacctctctatacttctaaatgctctgacagcacatatcaagaaattttcatttgggcccagggcagggctcactcctgtaatcccagcactttgggaggcagaggcaggccaatcacctgaggtcaggagttcaagatccgcctggtcaacatggtgaaaccccatctctactaaaaatacaaaaattagccgggcatggtggtacacacctgtactcccagctactc

SEQ ID NO: 1260 - DNA, 618 bp, Homo sapiens
  misc_feature 513: n = A,T,C or G
ggatgtctgaatcttttatggaactgacttgcataaaatccagctgagatgctgtgttttcagcctagctgtagaagttgaagattctgtttattccctctgaggctggcatttctctgtgattgttccatttgatcccttcaatggcttagcctcatcagcagcattgcttgggagatataggttgttgaggtccctctgcttgtggccttttgatttttgtcctcgagtaaagaaaacaatccttttatcaaatatttgccagctgcttaggatacacatttcttaattggtacgttttgactgattattgaaaagtttacattctgacatcatatcgtatatgatgtatgtgttgggtgtgtgtgtgtgtgagtgtgtatgtctaaggaattagaagagaggactctttttccttctaaggacagcagttgattcttagagtctattggagctttccttcccttcttttatcaggtgaaacttggttgaaagggttaccttctagcaganaggaagggggaagatatgcctgctggtaaatgtaagcctcactgtaagctctcctagaatgctgttgtcaaaaggaaattttgatattattttatttaactctct

SEQ ID NO: 1261 - DNA, 535 bp, Homo sapiens
agacgccagaagggggtacaatgagtttatcttgagccataatcctgtcttgaatacataaaaatctatataaatttatgtgcatatattcaatttttgtaattcaagataacagagcttatcatttctaggcacaaggcttagcattttggtagcatagatataaatattctctaggaatagtgaatggtgagtaaagttaaaatgggaattagaaagatttccaggatattatcacccataaagatatattaaaataaagaaaatgaaattcaatatgtacatcagaatttcagatctagagcctacatctctgcattatttttatgcaaaagatttgtgatctattaaatctattttgagttctgcccatgaagatatatattttaaataaatattcttcttttacattggagtatctcccagatcccccacaccaaaaagagaactgtgagatataccagttattaataccagttattaaatcaacaactgggccaggcatggtgtctcatgcctgtaatcccagcacatt

SEQ ID NO: 1262 - DNA, 551 bp, Homo sapiens
gttagttatgtgactctaaacagattactcaagcctggtttgttcagactataggctgggatcataatacttgcagagctacactgaaattgaaaagtccatattagccaggtgtggtggctcacacctgtaatctcagcactttcagaggcctccacaggagaatcactggagcccaggagttggaggctgcagtaagctataattgcaccactgcactctagcctggccaacagagcaagaccctgtctcataaaaataaaacaaaagtaccagttatatatccttattcaaaatgcctaggacaccagaagtgtttcagattttgaatttattcagattttggaatatttgcatttcccagttgagcattcctaatcaaaattcaaaatgctgcaatggcatttcctttgagggtcatgttggtgctcaaaaagttttggattctagaacattttaaattttggatcatcagattagggatgctccgcctgtatatcatcccaacttgcagttactggtacatattgtgggctccttatatgccccct

SEQ ID NO: 1263 - DNA, 629 bp, Homo sapiens
gtttcagaatgttaaaatccttgtaaaatatattctttccttttctttgtatattatggagtattcttgtgaggtggtggtcttcatgagagttgcacatcacaactaccattggatacatgtgcccaaatcctgctctgggaatttctacatctgtagctgtgggattgtgtctatgcacttatatgtcttgttctagagagggttctggtatgtactgtgattgaaagacattcctgcaaggcagtgtttcatgaaagcatattctgtaggtcacctatgtcaaaatcacctggggtgttaaagtacaggtttctgtgccccatcctgaagcttttgaacctgaatttttgggcacaggtctcggaaatttgaatttttagtaacatctcaggctattatttgttgtaccaaagtttgagagccaccacattaagagagtatgaatctcaatctgtaattgggctgtgaactcaacttagtgtaggccacaacccgaatttaaaaagagaatgaaatagagaaaatatcagagtatgtcacatgtaataaggacaaacataggttatatttatttgtatgtgtgtgtgttctgggtcagcatacattgtgtatttcttactgatttg

SEQ ID NO: 1264 - DNA, 502 bp, Homo sapiens
gtgttgttggtctttttaattttacacattctgatgggtatgtggtggcttctgccttgcattttaattgactgttgcatacctttcttctgcacttgatactaagcttccatgaaaatcaggacaatcaattgtaccccctctagtgcctgtcactgttctttcagtgtcgtagttgtgaaataaatgtgaaatgaggacaataacttaatgttttgacatctagttttgggaatttgatgtgaaaaaaattgaagccatgaaaatatatatagataaatttgaccacaaatgtcattaaatagttatactttattggaattaagaattatttctggtctggcgtggtggctcatgctggtaatcccagcattttgggaggccaaagtgagaggatcacttgagctcaagaaattgagtccagcctgggcaacatagggagatcccatctttacaaaaaatttcaaacttagttgggtgtggtggcacaagcctatagtac

SEQ ID NO: 1265 - DNA, 540 bp, Homo sapiens
atctcattatggttttgatttgcattttcctaatgatcagtggcattgagcgcttcttaatgtgtttattggccatttgtctgtcttctttgcaggaatgtctaattcttttgtccattttagaattgggttatttgtcaacgcatggattgaaaatggtctggtaaacaaatgcagatattctctggagtatactttcatttttagcttaaaaagttctaccagtacagtttcatggtcaatgaataattcattgtcaaagataaccagctgtacaaggaagtaggacatcctgagcaagaattggcagaatgatagaacctcgaaataaacctacaaaagcttgaaaaaccagtcatagatcattaagataactatactgggctgagtttaagtaaataaaagacagatttaaagatatgttcagagatcaggagtctaaaaagtgacagagctacacagcaggttgaaaaaagaactaaatgtaatttctactaatgaaaaatgcagtaataaaactcatctttcagcttaactact

SEQ ID NO: 1266 - DNA, 245 bp, Homo sapiens
gcttgttcttttggccgagcggcctacggctgcgagaagagacagagggggtgctagcaatcagcgagactccgtgggcgtaggaccctccaagccaggtgcgatataatctcgtggtgcgccgttttttaagctggttggaaaagcgcagtattcgcgtgggagtgacccgattttccagtgagatgaacccggtacctcagattgaaatgcagaaatcacccgtcttctgcgtcgctcacgct

SEQ ID NO: 1267 - DNA, 511 bp, Homo sapiens
ggtattccatcaaatggatatgccataatttgtttattcattgacctattgatggccatttgggttgtttccagttttgggctattacaaataaagctgctatgaacatttgtgtctaaaacaaaataaaattagaaccatacattattgcagtattggccattataagatatctgaatatttgctttttaagcctatttgtttaatttgtaggagtactttggtgtagcactgctaacatagtagcttaaaacatgctggaaaagtagtctttaagttattgctcaatttgtcataaaagtcagtttgtactggtaagccatgaaagtaactcaggaaaggtgttcatttagaggcaaatgttatggttattgtgaggccacagtgttgctttgcaaagaacccgggactcaaaatcaagtgaactacttatttccttgattctgtgactcatgagatatgaacagaatgaagtgttttccttctctatatttaatcaatgatttctata

SEQ ID NO: 1268 - DNA, 667 bp, Homo sapiens
ggaaaacactttgcaagtctaaaactaaaagtatcagatgaacgctattcagtgccctgatgaggtctctagttgaaagtaaagaggtagccctcttattatctggctggacatttccctactagagagaatgtccatctaaataagttgcaattgctgcaactggaagcagtttcctcacattatttaatccatctgcatccccttctgcactgaaaatggatagctaaccagctactgggaagatacttggggaaaactgggacgtggataaagttgcttaatgatgaagggaaggattattctgagtagaaattctgagaatcccccagtgcaattttgtgtcattattcaaattgacaggactcactactctgtttaaataatgctgtgttctggtaacactggttatgctggttgctcttacttgattgtttatttagtttaaaatatttttaatatgagttactctatagtttattccactactttgttcacacagaaactgaaaaagttgcctcaagatctcaattttcatttttgcacatttggaaatgttgtttttaacctagccttgtcaacaggaaggttttcacaaactggattgacatcccaagatgccttttcattgagtcagtttctgcagggcatccagcttctctccaca

SEQ ID NO: 1269 - DNA, 618 bp, Homo sapiens
gtatgtgtttaatcattaaatatatattttaaacgtatactaaatatgtttatattttaaatatatatgtaaaagagtaaggtcgtgataaatacaaaatttaggataatgattacatctggaggagaggcagagggatgggatgggaaggattataaaaagttataaaagttatggttcttgggtaggatggtgagttcatgggtattcactgtattatttttaaaaatgaaaataaaataatataggacaatgcatgagtagaaaaaaaaacagtaagatgctgaaattcagtgctctaagaaagcaatcatctttatggaatattaactatgtcttactattaagatcagatttttattttaaatccagaacatatatgtccaaagtaaatgttcttcacgagtagccaccataggtaacttaaagtatctgcattctaaaaaagtgctttccttttagaaatagtttacaggatactctagaaattcagttttattactattatcttcataaacatctcttctttaaagtatcactatctgaggctgggcatagtagttcacatctataatcccagcactttgggaggctgagacaggaggatcacttgagctc

SEQ ID NO: 1270 - DNA, 485 bp, Homo sapiens
gaggggcctgtgagtgtaaggaagatattaacattgggagaaaaccagagatgcaatgacatggtaagatccagacatcactcttccaagtctttccttgctagatctttccagatgatgggaaggttaggagagggcagcaggagagaagctctgagtgacttcatctaaatcaagtagccctggtgttcctgctatggtaagagattatggcaaatttgttttaacaaatgatgacgacagttatctctcttcctctcttccaaattcacccaacacacacacgcacacacacacacacacacacacacacacacacacacacacttagccaaagaatacttcagaacattaaaataactggcagacttaattttccattttgtccttccacagctattttataaaaaatccttttgagatataatttatataccataaaattcacccttttaaaatgcacaattaagtggtttttggtatac

SEQ ID NO: 1271 - DNA, 650 bp, Homo sapiens
ttgttcttttggccgagcggcctacggctgcgagagtcgacagaggggttggctaagtctgtcaactccctgtgctgtgcagaatcctgtgcctggcatggtgacagtatcggctctgggcctgtgagtgtggcccttatggaatcacagattgttggaaggggagtggagtggggtttggaagaatagggacaaggttgggtgtgtcctaaggatggtcaaggctgtggggccagccctggattaaggaagtggaactatggaagttagtcacagttggggggtgagtttagaatgtagctagggcagaatgttgccatagcatgccaagagtcagggtaagttaagagtcagagactgggcaggttggctgggcatggtggctcacacctgtaatcccagcactttgggaggctgaggtgggcagatcaatagaggtcaggagttcgagaccagtctggccaacacggtgaaacccagtctctactaaaatgacaaaaagtagctaggtgtggtggcatgcacctatattcccagctactcgggaggctgagtcaggagaatcgcttgaacctgggaggcaggagttgcagtgagctgagattgagccactgcactccagcctgggcgacagagcaagactccatctc

SEQ ID NO: 1272 - DNA, 692 bp, Homo sapiens
ttgttcttttggccgagcggcctacggctgcgagaagagacagaagggctggtactctcattgagacatggaattaccgttccttctgtgagagctggatgccttttactggtcttttttgactggtgaaattcagtagaagtgatgttctaggacttacaagtctaggtcataagaagtcttgcatattatgtgttagaacattctctctgggaactttaacctttgacccaccctgtaagaaatctaactaccctgaaactaccgtgtcagcactccagttaacagacccagctgagctctgccttctagatgttgtccccacggcgtcagacatgtgactgtaaccatcttggactctttagatctttctagctgccagatgaacaccgctgagtgacctcatctatgccatatggaacagaagaatcatctagcagatgatctagtgatctgagaattgatccttctcaaattcctggcctacaaaaattatgagataaaattaaatggtttttgttttaacccactacgttttggggcagtttgttaggcagcaacagataattgggaaatgctgctaccctctcagattgatgatccgttcattctatatctacattaataatgggaagtaacaacaatcctccactaacccctacacatacatatattcacaatacaactttaac

SEQ ID NO: 1273 - DNA, 478 bp, Homo sapiens
atgtttacatgttcatttatgttctttgtatatttgtcatgtgcctgaatatttatgcacctgcatggttgttgaagtaagctcactagcatacattcatacatttttgtgggtatgtgtgtttatatataacctatatatatatatacagtatgtgtgtatatatataaatatatgtctgtgtgtatgagaaacagatgcactgtaggcagataaagcagataaatatagatccaaatagaagcataagcatataaatatagacgttatatagagtgaaagcaagcagatcagcaccatttcattattgcttgaagtctttgtaataaaagagttagaaatcagtaactgacattgaaattattgactgaatgacactgtcatatcagaaggctcagtgtgaggtaagaaaataacctttctttcaactttgaggagaaattagcaggaagatttattactgttaattatttgattt

SEQ ID NO: 1274 - DNA, 619 bp, Homo sapiens
atccctcttgggttgcaattaacttaatctgaagtatatttcagccgttagtgggcttttgatctgagagtgttattttgttcagcctatctaaatactcattgatctgacaggtaatgagcgacatttataatggaggtcattcccttctattaattttaactgctttacagcttttgataaagtgggcaagagtggatgcttatctattttgtatctaaaaaaaagtgccttcgtgaggacaatgtgctatttggagaaaccactttattttcacataagtaaacatgttttcagaataaatcctcttgacattgtaatatttttggcatccattgctctttctttataatatgaaaaatagcatactagacattgtgaattcacgcacccagctgtttactttcagcgaggacccgagaatttcccatacagtcaggaaatatttattagccatgtatgatatgccaggtactatggtagatttagggtgtgttttctcaaccttagcactattagaattttgggccaagtagttcttggttatgggtggttgtcccgtccattgtagaatgtctatcatcatccatgatctttacccactaaatgggtaatggca

SEQ ID NO: 1275 - DNA, 526 bp, Homo sapiens
agaagggattcagcattggcttgagggcatcggagggttttgactggcccagtcatctctaccagtgaagaaagcaaggaaataggtcatttcactcagggacagcttgaaaacagagatttcatggagcttcctcattccgtcagcctagagtgggattttggctgtcacccttcaaggatgaaaaggtgcagaggacattgggctgcagacagggcgctcgtttaaatgatttaaaagttttggtcagtcgtggtggctcatgcctgtaatcccagcactttggggcgccgaggcgggtggatcacctgaggccaggagttcgagaccagcctgactaacatggagaaaccccatctctactaaaaatacaaaattagtcgggcgtgatgccacatgcctgtaatcccaactactctggaggctgaggcaggagaattgcttgagcctgggaggcggaggttgcggtgagccgagatcgtgctattgcactccagcctgggccacaagagcaaaactccatctc

SEQ ID NO: 1276 - DNA, 633 bp, Homo sapiens
acagaagggggggacactgctggttgaaattcatcctgaggcttatttacaattggcacaattagagcttttgagaattcagcagccttgatttatttgcaggggttcatatagcacttgagtcacgggcgaggtgaggcacagaggtgggtaggggacttactgctttacatttaagttctatggaatttcacatttctattttggggaagaaaggattgtctctagagagagagcatcaggttctttaacaagatttaataaatttgggtccttgtatcgatcaaacttcatactagatcagataacaaaaaattgaatatggctttgcactagaggctattttattttctgtgctgccaatgaactaagtttctataattttgctttcactatttgaaattttaatttatccatcagatgtttattgatgcctaatgtgtattcagtactttactagccacttgggatccatcagtgaaaagataagtaactcatgtagtatgttaggagatgattagtgcacaattcatttatgaatgacccataaaagaataagttgataaattagatttcatgaaaattaaaaaattctgcactttgaaaacattattaagaaaatgaaaaggtaag

SEQ ID NO: 1277 - DNA, 702 bp, Homo sapiens
acagaagggatttacagttttaaaaaatatatttgtgaccatggtgtatacggaactttgaccctggctgcttctgctcatttaacatcccattctaggcattttctgaagtctttgacaattatttgcaagcatgttgttaatggctgtacaatgttccattgaattgtaggtaacaacaacacaagtacagctggcccttgaacaacacgggattgaactttgtgggccagttttatacagatttttttcaataaatacattggaaaattttattggaaatttgcaacaatttgaaaaaactgacagatgaaatgcataacctagaaatattgaaaaaaattcagaaaaagttagatatgtcctgaatgcattaaatatacgtacatactagtctattttaccatttacaaccatgaaatacatacaaatctattataagaagttaaaatctatcaaaacttacacaaacccagactgtatgtggtgtcattctctgtcaagagaaacgcaaatgtaaagatgcagtattgaatcataattgcatgaaactaactgtagtccattcagtgctactgtaaaatttcctggtcactgctcgttcctactgcagtgagcccaagtgtttcaagtgcccaattaaaatgctgtgtgacaccgatcacctctatggcaccagctcattcctccagtcagttgcat

SEQ ID NO: 1278 - DNA, 565 bp, Homo sapiens
cttgttcttttggccgaacggcctacggctgcgagaagagacagagggccttttcccttgctgcaccatggagctctagttctttgagtagcaagcacctgccaagatactccacccttcccacattcattctttcctttcccattcagcaaatacttattgaggatatcctgtataccaagaactacaggccctgggatacaaggtgaataaacttggctcctatctcttaggacctcactaaggcgaaagacagaagggttaataacaattagaatatggcttgagaaaggccagacgagagaaagcagaagataaagggagactaggagaaaagaaacgttagcaatgctcacaggagagaggaagccttcactagggttttggcagctgagctgagttttaagggatgggcaggagtaggcaaattgctggagtcttggatttatagactaggagggatggaaaggatactggaaattacattttggttgacttaataatgaaccatccattgtcctagaggacaatgtcatagatcattcaaatttatatcttttccttg

SEQ ID NO: 1279 - DNA, 357 bp, Homo sapiens
tgttcttttggccgaacggcctacggctgcgagaagagacagaagggaagttataagaactttggagattagtttagagattctaaactgggaggatgtttttaatttgaaaaaacttaaaccacccatttgttcatcttacaaagtatggaaagcaaaatttaataacatattattgtctggtctgtcagtaagaaaacagtgggtttgagagactatacaggctgggtgtggtggttcacgcctgtaatcccagtgctttgggagcccaaagcaggaggatcatttggggccaggagttcgagactagcctgggcaatgcagtaagaccctgtcttctgcaaaaaataaaaatga

SEQ ID NO: 1280 - DNA, 638 bp, Homo sapiens
gggagtccagtggaatggagaaaattttttaagttaaaaattctaaaggacatatgtataatggtaggaattatttagtcttcttaataaaataaatcatttattttagaattattttgtagtctgaaagcacatttcctataatttttaaatgtgaaagcaggcaatattatcttgtaggtattgtattatattacaagagccaaagcatgctgattcccaatttcatccagtatgacttgtcttagaaaaagaaataaaaatgcagatccatttattcacttattaactgagtacatttcctgaatccatgtgcacgttgggtgataggaagctgaggccctgctggctaaagatgtaagagaacagagcccaaaactggcacaccagctggaaattaggagggcaagtttccctagaaatgggagaaccacagataggatgaaccccaaaatctgaatataaactctttccaaatacttggctgaccaccaacttatgcaaacataagggagacttcagtaggccagcctgaaacaaagcaactgcagaagctgaaaaatttagggatttgtcagttgctgcatatcacaggagagcagagcttgtagtttgagtccaggtcagctaacttctta

SEQ ID NO: 1281 - DNA, 461 bp, Homo sapiens
acgacagaagggatgctcagagaaatactctatgatttcagttctcttctgtttcttgaagtttgttttatgatgtaggatgtagtttgtcttagtcagtgtttcattggtgcttagaaaaaatattctgctgttgggtggcatgttctctgggtgttaattagaccagtgggcacagcttttcttcctgaggagccgggctgggagagcctattcccactgggctctgtgagaccagggtgggaggaggattgtgattttgcccttggcgcctggctggagtagaatgaatattactgcaagtgttttctgatgttaggccatccttctcttggtactttggctagcggagttgggcttttctcggctttttctggggtcgggtgggtgggctgctctggtcctgttggctgttccaggttggaggcttctgcagcacattgtcagggatctatggggga

SEQ ID NO: 1282 - DNA, 535 bp, Homo sapiens
tcttttattaatgcatggtgtgcaataacaaatcacaataaccagtgtatattgagtgatataatatattatgctgaagttctttcattccatcatctcatttattctcaccttaatgttgtctttattttaaagctgcattttaaagcaaaatctgccaaagttcacccatctagtaaatgacagagctgggactggaaaccaggctagaatatccttgtgtatgaatcagtaatcatggtaaacaagagattggtcagggaaaaattttggttggaataggaggagagagagtccagtatgtaaaatgtgattttgctattttacttgaaaattgtagatttgtagaatatcagacactcatacttaaatatgagtacagcctaattattgctgttcctttttctttcagagatttgatactcaaaattcacaaatgagagcttctccacatttttacttaattcataatttcttcacacatttatagacaatacacacttcaagcatgtatggtgctaaattacatattttt

SEQ ID NO: 1283 - DNA, 574 bp, Homo sapiens
acagagggaagtggatgttccttctttagtaaaatgtctatttatatattttgcttgctttttaaattcttatttatttttagagaaaagatcttgctctgtcacccagccaagagggcagtggtttgatcatagctcgctgcagcctcaacctcctgggctcaggcgtcctcccgccccagcctcctgagtaactgggactacaggcacatgccagcacacccaccgaatttttaaatttttttgtagagacgggatctcattatgttgctcaggctggccttaaactcctaggctcgagcaatcctctcacctcaccctctcaaagcactatgtctggcaactcattttcttcttctcaaatgtattttgcctatttccgttttcattaagaaataaaatatggttgggccagtggctcacgcctgtagtcctggcactttgggaggtcgaggtgggtagatcacctgagatcaggagttcaagaccagcctgaccaacatggtgaaaccccgtctctactgaaaatgcaaaaattggccaggcatggtggcgggctaatcccagctactcg

SEQ ID NO: 1284 - DNA, 717 bp, Homo sapiens
acagaagggagtatatacatgttgaatttatttttgtaggtcctcaaagttatgtctttctggcaagttagctcaccaggaagtttcatagtggaccaaatagcctttgtaggcctttttgaactatgttttaatgttttgctctaggtcattagaagaaacagcctcatgaaaagcaattttgcatttggcatatgtcatcttgtataattcagtagcccttattagagattccagaggagaaatgtcttttggaatttagtgtaagaaatccagttgagaagcaaccttgctctttattttatttatttatttatttgtttgtttggtttttgttttgacagggtcttatgcccatcacccaggctagagtgcagtggtgtgatcacggcttactacagcctcaacctcctgggcttaggtgattctcccacctcagcctcccaagtagctgggactacaggcacacaccatcatgcttgtccatttttttgtatttttagttgagacgggattttgccgtgttgcccaggctggtcttgaactcctgggctcaagcgatccacctgcttcggcctcccaaagtgctgggattactggtgtgagccaccttgcccagccaaccttattcttttttgaagggctataatattccgttgatggatgcgtcacaatttgttttaaccagtcttttattgataggtatcaaactattga

SEQ ID NO: 1285 - DNA, 533 bp, Homo sapiens
ggttgcagattgtatgtacatccctgcaggctggcaaacgatgggctagaaaatgtggtggcaggagtgaggtccaggtgggtagtcagcatcagtacacaggcagcccgtgttcaagagaactaggagagaaaacaaggcccctctctgggatgcccttaagcactgagtagggtaccagggtgaactcagtgtaaagcaaggcttgctccatggaatcagagccccatttctaaaattggaatttgtggttgaatgtgacctagtggctaacctaattatggaactgctcggtttcaagactccttgagattctctgaccaggaggaggaggaggaggactgatcctatattcttgagattggagtgagtttggagctgggtgttaattgacttctgtttgggggtgagagcaccatgactgcaggcagggaggcaggtcattcattgccccttgtgtcagctctccagatgccatgagagctgatggttgtggccgggcgtggtggctcacgcctgtaatcccagcagtt

SEQ ID NO: 1286 - DNA, 517 bp, Homo sapiens
aagaattccctaagctttgatatttgggtaattccttctccctaaaactatgatgtggaactagagggttgtggaagttacccgttgattagatgggtgcctataatttggcctattttatcataatctttagaatctgttaaatttcttttttgagatggagtctggctctgtcacccagtctttaaattggcaattttgacaaatgattttgtgaggtgttgttaactgtgctagaaattgtgaatgttaagttgtttatatgctacccaattaaatgtcatccagccactcaaaaatgttctgacatttttcagtgggtttcttcaaatttgctatcaatatcatttttttgtaaatacgccaaaaaaagaaatgcataaagaaggtaaaaaaattttgttgtctaatgctccaaaatgaaatcagaaactgatctaaaatctgaattagccaatgcaatatggattttgataactcaatcaaaataatgaaaaacagataatcttttcattat

SEQ ID NO: 1287 - DNA, 341 bp, Homo sapiens
taatacataatggaggttttcttcctgatgccatcaacaaaatcaaagaatattttttaagacagcaacaacaagaaagagagatctagagaggaaagagcggctaggttcctggcattctatagcaaactaagaaaggatttactcagctggccgtggtggctcacactagtaatcccagcactttgagaggctgaggtgggtggatcacaaggtcaggagattgagaccatcctggctaacacagtgaaaccctgtgctctactaaaaatacaaaaaaaaattagccggttgtggtggcaggcacctgtagtcccagatactcaggaggctgatgcagg

SEQ ID NO: 1288 - DNA, 534 bp, Homo sapiens
atatttcagccgttagtgggcttttgatctgagagtgttattttgttcagcctatctaaatactcattgatctgacaggtaatgagcgacatttataatggaggtcattcccttctattaattttaactgctttacagcttttgataaagtgggcaagagtggatgcttatctattttgtatctaaaaaaaagtgccttcgtggggacaatgtgctatttggagaaaccactttattttcacataagtaaacatgttttcagaataaatcctcttgacattgtaatatttttggcatccattgctctttctttataatacgaaaaatagcatactagacattgtgaattcacgcacccagctgtttactttcagcgaggacccgagaatttcccatacagtcaggaaatatttattagccatgtatgatatgccaggtactatggtagatttagggtgtgttttctcaaccttagcactattagaattttgggccaagtagttcttggttatgggtggttgtcccgtccattgt

SEQ ID NO: 1289 - DNA, 602 bp, Homo sapiens
atctaaggataatagacatatcactaaaaaggagctatagaggtgatgagaggaaagctctcccagtttaattctgtgtctgactagcagacctaatgaaattttcccaactaataaatagaaacatagatagaagataaacaaacagacagacagagatatgaaaaagtcaaattagcataagtgcaaagccaataaaactggacttaaaaatttaatcaacaccctccatttctttgtctgcagaaacaaagagtgcccacccctacctccagcctattttgaagaacataaggacaaaccaatcaaaaactgtgcagcctttcctttatagattgatgttgcttttggagaaaaaaataatactgtcatcacctttctgtttcccatgagttgtcacctctctctcaaaactcaggcagaaattacagttcctagcgtataattaggcatgacatagaaataggaagtacctggtgttgatgtagttcccacaagaaaaaaatgctacaggcagaagaggtagagaatataggcagagtcatggatgttgaaaatatccatgattatagatttgtgtgtactcaatctattcatgtctt

SEQ ID NO: 1290 - DNA, 579 bp, Homo sapiens
cgacagaagggcggccacacttggccgatttttgtatttttaatagagatgaagtttcaccacattggctaggctggtcttgaactcctgacttcaggtgatccacctgcctcacctcccacagtgctgggattacaagcgtgagccaccacaccccgctgggaaatatcttaaaagaatcaaaataagaaagttactctacttaaatcgtgtgctttttctgtgtgtgatttatggtaatcttaccatggggtatctgattactttagaaagatccatttagcttatttttttcttctttgggttatttttttcttccttccatttgcacagcctccccccaaataaaaaataaagatataaagtctatcttctccctcttgtcagtttaagtaaaaagaacttttgcttccattttaataatagaatttgtgtgtatataatataggcagtgatttggcctcaagctgagtttagatttgaaaagatgagaatattaaagcttgtcagccagcccacaaaccaagtcacaccagataagacaaactgaaagaatctacactgagacacattatattc

SEQ ID NO: 1291 - DNA, 416 bp, Homo sapiens
ggggattttttttagggtctcactctgttgcccaatttggagcagtggcgcaatcacggctcactgcagccttgagctccgctgaagtgatcatcctgcctcagccaggcatgcatcacgaagcccagctcagtttttgatttttttttttcttttggtagcagtgcagtttcactgttttgcccaggctgatctcgaactcctgggctcaagccatcctcccagcgtgctggaattataggcatgagccaccacacccagcctcaatctggaattttacacatattttaagttcatttgatttttgaacatgtattggctaaattaatgattaactgtctgggcatggtggctcaggtgtgtaatcccggcactctgggaggctgaggtgggtggatcacctgaggttgggagtt

SEQ ID NO: 1292 - DNA, 619 bp, Homo sapiens
agaaggggtcatccatttcttatcctagtccaaactctactagctgttaaggtggatacaagtaaatgtcattgtaaatatggctgttttcccactgctctataacgaggaatagcacggcattgcctgtacggaaaattaaaggaaagcagtgggaatccttgtatcatggaaatagtagacacttaggtaacagtcttcaatcttttaagattatgacctcctcgcagtttgacacactgccttatgcatatttaccaaaagatgctcagagattagaatttggctgcatcaaaataagttttacggccgggcgcggtggctcatgcttgtaatcccagcactttgggaggccgaggcgggcggatcacttgaggccaggagttcgagaccagcctggccgacacggtgaaaccctgtctctactaaaaatacaaaaaattagccgggcgtggtggcaggtgcctgtaatcccagctatttgggaggctgaggcaggagaatcacttgaacctgggagatggaggttgtggtgagctgagattgcgccattgtactctccagcctgggcaacaagagtgaaattccatcacaaaaaaaaaaaaaaaaaaaaaaaaaa

SEQ ID NO: 1293 - DNA, 564 bp, Homo sapiens
ggggctgccttatcccaggtatccccagaacctgaacctcggctgagactgggaaggacgtggtgcctgggggaggtctgttaaacaacagaaagagtgacctttggtgagtgtctggcacaattttctacactgcctggctccagattcaccaccgtggcagagccaactcctcagtgtaagccccaaggcccccgcacttggctcaccacctggcgagtggcagcgccatggtgacctcagagtcttcccatgatgaatggttcccactcagtcaaaggcacttacaacctgcctcaaacacatgaacactgattgaatccttgttttaaaaaaattaggataggccaggcacgatggctcatgcctgtaatcccagcactttgggaggcttgagttcaggagttcgagaccagcctgggcaacatggtgaaactccgtctctaccaaaaatataaaaaattggctgggcgttgtggcatgcgcctgtagttccaactactcaggaggctgaggtgggaggataacttgagctaacttgagcctgggaggtagcggttgcag

SEQ ID NO: 1294 - DNA, 666 bp, Homo sapiens
  misc_feature 539: n = A,T,C or G
gaggtctccaaaccatgctgtgctcttgtcatgaacctttcccttcctctggcccccacttccagctctctccctggatttttctttttcttatatatacatatatttttatttgagacaggatctcactctgtcacccaggttggagttcagtgccatcatcttggattattgcaacctccacctccgaggctcaagtgatcctcccacttcagtctcccaagtagctgggaccacagacgtgcaccaccacacccagctaattttttgtattttttgtagagaagtggttttgccatgttggccaggctggtctcaaacttctgcgctcaaaccatcttcctgcctctgtctcccaaagtgctgggattacaggtgtgagccaccacacccgtccttctccctggatttttccttttaaaatatgagactttgtattccttctcctaaatgatttcccaccacatcatcaaaacaaaggcatccgtaggtggaattgccctctttaatgtgggagaggttgtaaatactgaaaattntattgtttttttcttggttatagtcagctatattccttccatgcatttattccttcctcagacataattcaagacatttcctgagtgccttctgtgtgggccgaatgctgtagctgctgggataggt

SEQ ID NO: 1295 - DNA, 315 bp, Homo sapiens
ggcctacggctgcgagagtcgacagtagggatttccaggtgtacatattaatatgtaaatataaaattgaaaatgaatttttggtacatcaaatcatttttcaaagtttatatatatatatttttagatggagtttcgctctcttgccaggctggagtgcagtggctcaatcttagctcactgcaacctcctcctcccgggttccagcgggtctcctgcctcagcctcctgagtggctgggattacaggttcatgctaccacagctggctaattttttgaatttttagtggggacggggtttcgccatgttgacc

SEQ ID NO: 1296 - DNA, 349 bp, Homo sapiens
ggatgtcatcttgtataattcagtagcccttattagagattccagaggagaaatgtcttttggaatttagtgtaagaaatccagttgagaagcaaccttgctctttattttatttatttatttatttgtttgtttggttcttgttttgacagggtcttatgcccatcacccaggctagagtgcagtggtgtgatcacggcttactacagccttaacctcctgggcttaggtgattctcccacctcagcctcccaagtagctgggactacaggcacacaccatcatgcttgtccatttttttgtatttttagttgatacgggattttgccgtgttgcctcaggctggtct

SEQ ID NO: 1297 - DNA, 624 bp, Homo sapiens
ttgttcttttggccgagcggcctacggctgcgagagtcgacagaagggatgtcatcttgtataattcagtagcccttattagagattccagaggagaaatgtcttttggaatttagtgtaagaaatccagttgagaagcaaccttgctctttattttatttatttatttatttgtttgtttggtttttgttttgacagggtcttatgcccatcacccaggctagagtgcagtggtgtgatcacggcttactacagcctcaacctcctgggcttaggtgattctcccacctcagcctcccaagtagctgggactacaggcacacaccatcatgcttgtccatttttttgtatttttagttgagacgggattttgccgtgttgcccaggctggtcttgaactcctgggctcaagcgatccacctgcttcggcctcccaaagtgctgggattactggtgtgagccaccttgcccagccaaccttattcttttttgaaggctataaatattccgttgatggatgcgtcacaatttgttttaaccagtcttttattgataggtatcaaactattgattattttgctgttataaatagggcttaagtgtgaatatccttacacatatctt

SEQ ID NO: 1298 - DNA, 179 bp, Homo sapiens
ggggaggggagtaatagcttgctgaaaaacatgccaactgagttatgggtcttcacgcagccagcatgctgtgttttgggctctgcctcttgtaatttttagaaattaattagtttattctttatttatatttatttatttatttattttcagatgggatcctactctgttgcccaggc

SEQ ID NO: 1299 - DNA, 491 bp, Homo sapiens
agaagggagtaaaaatttcaatgacctaaatatccaacactatgggcaaatggtttaatacattatggctcactagtgtcatgcagcattatttagctattaaatattgtttatggccttctgggtgcagccaagatggaataagctgactataacctctttcgctgattacaatgaaaaattctagacagaatataaaaagcaactactcaaagactcaaaagtgaacagaaataggtagattaagaattaaagtaaaaacgtgaataacgactcacaacaggagtgagtttcataggccttttcttttctttttttttacttctttgtctcctgattttgatctgagggtgggccaaatcaaaactgcctagctagcgtagacagcaaaactctgagagaaatttcttatttatagccagtggactagggataaaggaaccctgaatgctagagagtaagaaataggtaggaaatctctttgctgtatt

SEQ ID NO: 1300 - DNA, 525 bp, Homo sapiens
gtggaggcctaaagactgtagagtaggaaaaaacagataaatggagtctataaagaaagtcaagagaacaaactgattttgaagggaatattatgttcctgccaaaatcccttgactcaaaaaagaaaagacagatgatccctcctgttacatgacagttgggtcataatctctgttttattcagagataagaatgaaagtatttttaagtcaatccatagaagatctaggacaccatctatccatcaagagaaaggttgaccctttactgaaaaagaagtcttgaaacagtaatcatggactatttctttagaattaaaaaaaagtgagaataatgaaatagtcctgataaatatttattttatttatgatttaagcagtgcgtctaagcatttgaattattgacttgacctcttacattttcaaacgcaataaaagctctcttagccgacttttatttaactgacttacctgatgaactgacactttcccttatacagctgacacccataactcacctattct

SEQ ID NO: 1301 - DNA, 346 bp, Homo sapiens
agcagaaatcgcgccaccgcactccagcctgggagacagagccagaccctgtctcagaaaaaaatttttttttcttaaattattggagcctgatggcacatgcctgtaatcccagctgccctggatgctgaggcaggaggatcacttgagcccaggagctcaaggctgcagtgagccatgatggcacccttgccctccagcttgggtgacaaaacaagatcctgtctcagtaaataaataaataatagcaacagtggagatatatagtgtggggtaaattgtatctcagtaaagcttttaaaaaagcagtgtgtgtctgtttagcatcccaaatcatttcttttat

SEQ ID NO: 1302 - DNA, 608 bp, Homo sapiens
gctccttccctttcccctttcctccctctcttctttctctccttcctccctccatccctgccagtctcccttcttcccttcctcttttccttcctccctctctcttccctcctttcttttctcttctttcccctctgaaagcatacacattctcatataaccgtgtgcagacaactttgtaagtctgtcttcttctgcactcccacaaatcaccatatgtaccctcgtactaatcttaacagcagctaatatttatgaagcttttcttatgtgagttgctttgcttaagatacattaagaagccatgacgttggctgggcgcggtggctcaggcatgtaatcccagcactttcggaggctgaggcaggtggatcacaaggtcagcagttcaagaccagcttggtcaacatggtgaaaccccatgtctacgaaaaatacaaaaattagctgggcatggtagcggatgcctgcaatcccagctacacaggagggctgagggagagaattgcttgaacctggcaggcagaggttgcagtgagccgagatcacgtcactgcactccagcctggacaacaaagtgagactccatctcaaaaaaaaaaaaaaaa

SEQ ID NO: 1303 - DNA, 175 bp, Homo sapiens
cagagaaatttgaggtcctcgcttgttctctgccttcaagaaacaatgacctgattctgtctttaggaaaaaatctcagaattctttttttgtttgtgtttttttttttttggaaacaaagtctccctctaccctgggggacaaaatgaaaccccgtctcaaaaaaaaaaaaaaa

SEQ ID NO: 1304 - DNA, 236 bp, Homo sapiens
gaagggtatgtgaagagttatgtttgatttttaaactaagacaccattaaactggtggttctggggtcatttgcctgacccaagaatcagatacgtaattggaccacttgttaacttctgagtatattgtcatatacttagttttgtctctgaaaagaactgctattttttttctttctctctttttttttttttaaaacaaagttttgccttgttgccaggttaaagggcagggt

SEQ ID NO: 1305 - DNA, 143 bp, Homo sapiens
cagcagggtatctttcagcaagccccagaccactggactgttaaaaatgttggctgggcgcggtagctcatgcctgtaatcccagcactttgggaggccaaggtgggtggatcacctgaggtcaggagtttgagaccagtatg

SEQ ID NO: 1306 - DNA, 458 bp, Homo sapiens
cgacagagggactgagctctgctctatgtggtctcttgtccttcagtaggtaagaccaggtttgttcatatggcagtgacagtttctaagagaatgagaagtgtgcaaatcccttgagacctagacttgaaaccagaagaacatcaaaaccaattaaaatccaaggggtgagaaaataaacatcacctcttggtgggagaagttgcaaagttatattgcaaaacatgtggatacatgaagaattgtggccatttttgaaaatgaatgatcacaggttttttttttttgaaagatgaccttaaactttaaaatatggtcttttattaaaatattaagtttttcacactacacctttttccttcccatatttataatgggggcaccttttgccatcctcctttcacacaccatgtacctgtatgttccagttaataaaccactcctttggaaaaggactt

SEQ ID NO: 1307 - DNA, 420 bp, Homo sapiens
cgggcagatcacgaggttaggagatggagaccatcctggctaacacggtgaaaccccgtctctactaaaaatagaaaaagtagccgggcataggggcccacacctgtagttccagctacttgggaagctgaggcatgaggattacttgagccaaggagatcaaggatgcagtaagccatgaccatgccactgcactcgtgcctggacaacagtgcaagaccctgtctcaaaaaaaaagagaaaagaaaaagtaaaagtagatacacagggaactaggcaagtaaaaaatagaacattaagcagttgctaatgctgggaaaaatctaaggattgtacaaaaaagtatgattgggtcaggcacagcggccgatgcctgtaatcccagcacttggggaggccaaagagggcggatcacttgag

SEQ ID NO: 1308 - DNA, 317 bp, Homo sapiens
gaaggggcctcccaaagtgctgagattacaggcgtgagccaccatgcctggcctctttttttttttttttccctttttcagggccctttgggaaaggaaccaggaaacccctcccccaaaaccaggggattgggggccttaaaaaggaaacccccttgcccttttaagaaaaaaaaggcttggtttaaacccccttcctgggaattttgaaccttggaaccctaaaatcctgggttgaaaacaggggaacccaaacttccacagtttttggttttggcccccatgttttaaaaacccaaaaataaacctaaattttt

SEQ ID NO: 1309 - DNA, 256 bp, Homo sapiens
cgacagaaggggggcgtggtggcatgcacctgtaatcgcagctaccaggaggctgaggcaggagaattgctggaacctgggaggcagaggctgcagtgagccaagatcacgccattgcactgcagcctgggtggcagagtgagactctgtctcaaaaaaaaaaaaaaaggttttatttgaattttttcacaaaacacccttttttcaaacccatttttaaaaccctaaggaaaaaaaaattatttttgctgctttt

SEQ ID NO: 1310 - DNA, 527 bp, Homo sapiens
ggggaaccttgtccttggaaccaagcctagcctaggctcagggacatcatgtgggagtgacataaaggaggctcctctgtcactgtgcttgggttacaagtaattctcgacatgggagcatgttgatttctaaccatcggtggcggagctgtgacttcccaagctggtggctgacctcaagaggactattatagacactgtgggaccacggcctgagaaaagaatggctacctccctctctatcccatgacctctaacggcccggtcaccaccatggccttttgttcctggagagggacaggaactttggaaagtggggtcgctctattgcttctgcaggtcatcttcccagacttgcctaagcctcagaatctcagtcttctgctctgttttgcacgtcttttttgaaaggtttttaaaaattacaatctactgtacagaagaaaataatacacagaaaataattttataaaataatacaacagatatctaagtatccaccacccagattggacaacatattaaca

SEQ ID NO: 1311 - DNA, 546 bp, Homo sapiens
gggattgtattagagcataggtgagtcagcttgcggccccctgaagagtgacaacaaggctggaaaaaccaagaggcaacctttggccctatttgaggaacgaagagagcgtcaggctcttgcttcccctctctcatttctggaatagatcagattccacagatttgttttgctttttgttttgtactgcatttttttccaatcctggaaagaaagccgagggaggttgggtgcggtggctcatgcctggcagcccagcactttgggaggctgaggtgggcggatcacttgaggtcaggagtttgagaccagcctggccaacatggtaaaacaccgcctctactaaaaatacaacaattagctgggcgtggtggcaggcgcctataatcccagctacttgggaggctgaggcaggagaattgcttgaacccgggaggcagaggttgcacggagccgagattgcgccacatagtgaaaccctatctcagctaaaaatacaaaaaattagccgggtgtggtggcggacacctgtaatcccagctactc

SEQ ID NO: 1312 - DNA, 637 bp, Homo sapiens
  misc_feature 537: n = A,T,C or G
ggggaagaggcctggggactgactagtgcccagcaatagaaacaatcagcattagaaatgggcaaaggggctgggcatggtggctcatgcctataatcctagcactttgggaggccaaggcgggcagatctcctgaggtcaggggctcaagaccagcctggccaacactgtgaaaccctgtctctactaaaaatacaaaaattagctgggcatggtggtgcatgcttgtaatcctagctagttgggaggctgaggcaggagaatcgcttaaacgcagtaggtggaggttgcagtgagccgagattgtgccactgcacttcagcctgggtgatggaatgagactccttctcaagaaacaaaaaacaaaacaaaatgaaacaggcagagcagtttgaagaaacttctcaagaaacaaaaaacaaaacaaaacaggcagagcagtttgaagtatgatgggaatgaggtacaggggaggcaggaaggagaaaagtgcaaagggatagtgagaagatgggaggtggtgtggagaggaagcanggaagctggtagcaccaagaagtgaaagaggagtttgagctaaatatctagaggataaagggggaaaagatgagtctgaaaggtatgagagggtgacagc

SEQ ID NO: 1313 - DNA, 375 bp, Homo sapiens
atcatctctaggcacaattaccaagctaaattagatctctgaaaccatgtcatctccccttcttgctatcttgtgtacatagccagtgttgtggatgttggtaagaaggtagggaatttctccactttgccccctgtttttgacataaggtttaaatgttttttaaatagaaataccctcatggctttcctgacctggaaatggtatttctatttctggggaaattgagtagacaggtttaactaaaagacagtttcgtgtgtgtgtgtgtgtgtgtgtgtgtgtgtgtgtgtgtgtgtgtgtgagagagagagagatttgcacgcattatctaattctctctatgatcttgagagagtatatactctcgcatat

SEQ ID NO: 1314 - DNA, 568 bp, Homo sapiens
ggactgctcataggggagcttctagaaaggaaggacttattgtcttagttacttgatccacttccttacctcctgttcatgcaactttgcttgttttgcttctactaaaatggttctaggtgctgtgtggacaggtgatacaaaagcctgactcacacggttgacattcattcattccattttcatttctctttgagtgatcctgacaagcagagggtctcaggtggatattactgtgtctttgagacctctctaatccttatctatctctcattttaatacagagagtttcatacgcagaccttaagtagacatagtatccagctaaaagggtctcactctgtcacccaggctggagtgcagtggcgcagtcatggctccctgtaacctcaacctctcagactccagcaatcctcctgcgacagcgaagttaatcttctggttcggttcacaaagtgcaggagagcctaccagcttgagagaaaaggagtcatgctgtatttgtttccttgagtgaatggccactcagctgctgtgtttctccctgcatgtggctgaagttacattg

SEQ ID NO: 1315 - DNA, 601 bp, Homo sapiens
gtcatgttgcagtacatggcttgaagcctgttactgagaaatggtcttgtggtgcaacaatactaaagttcccatgaactttaagaagttgaccaacttatttcaaagtattggcatgctgagttgtcaaaatgacatccctgatttttttggtggagatggggtttcgccgtgttggccgggctggtctccagctcctgaccccgagtgatctgcctgcctcggcctcccgaggtgccgggattgcagacggagtctcgctcactcagtgctcaatgttgcccaggctggagtgcagtggcatgatcccggcttgctacaacctccacctcccagccgcctgccttggcctcccaaagtgccgagattgcagcctctgcctggccgccaccccgtctgggaagtgaggagcatctctgcctggccgcccatcgtctgggatgtgaggagcccctctgcccggccgcccagtctgggaagtgaggaatgcctcttcccagccgccatcccgtctaggaagtgaggagcccctctgcccggccgccaccccgtctgggaggtgtacccaacagctcattgagaatgggccatgatgatgatg

SEQ ID NO: 1316 - DNA, 632 bp, Homo sapiens
gacagaggggtagaaattctaactagattaagtaaaattgggctttgttgaaaagggtaaaaggtgctctaataaccccaaacagcaagatcactgaggccttttggcagtggggagccagagctactttcccatttcacccgttcagggaccaggctagtcactgcttcttcctctgtagacctgctttgttctcagcttcttcttcagccagtcttccttgtacatggctcagtgttgtttgccaccttggacttactcagtttttgttaaaattcacatatttccagaacaggaatctgaaagagctgttctttttgagccttaggtgggtcagtgaacaacctgtggtttggtctttttcttcatccccttccaggggtctgtatttaggtttagatagctagtgaaaatgaaatggcactgggtaatgacattgattcaatacatcttggctaggcacactggctcacgcctataatcccagcactttgggagactgaggcaggtggatcacctgaggtcaggggtttgagactagcctggccaacatggtgaaaccccatctctactaataatacaaaaaaactagctgggcatggtagtgcacacctgtaatctcagctactctg

SEQ ID NO: 1317 - DNA, 521 bp, Homo sapiens
ttatagaacaggttttattcttgttatttctttcttttataaagactcaagtgtatgaccgctttgacaacctcatttatcagcaaagaatgacgtgatactggactttttgatccaggttcccctttcagagactgccattgtgttatctatcacactgtgtgtttaccatgccatgcactgagatgctcactggactcatgctaaatggaatggacgctcttacttattctgagattttgctaaatcttaaagaaaacctagccctccacatactatgcccccaggaatatttccacttgaattatctatgccagtggttcttaaacattgtttctaaaacaaaaattcttttgataattggaatcttacctgtgacccaatattaaattattcatttattatttatttggttcattatatacatattaatgacacataaatagtgtcaggctctggtctaggaacagtagtgaataaaacaaaaccccttgccctccttgaacttgaattctaaacag

SEQ ID NO: 1318 - DNA, 606 bp, Homo sapiens
gttgggcccaggagtttgaggctgcagtaagctatgatcatgccactgcactccaccctgggtgacagcaaccctatctcaaaaactaataataatttcaaaagaatttgaataataccccgcagaacaacatctttattcacatcattctgctccctcccttcccatactatctgttcttacatatatacaaacatatgcagaattgtttaaatcctaacttttttcaattaccttatatttctacttcaattgccaaaatctctaaaggggtagtttatgtttatctcgattttttttcccaagccagctaattcaccgatttctagaccagactactgaataccttcactcaaactctgcccatgagtctgtacttcatggagctcccttctccctgtgtgcacttttcagccctgatcttctacccacatttgttttccccacaatgctcacaaatgcctttggcctgtatttccacctgtaccttcaacctcagtcatgttcccatccacaaaacttctccacctaagtattaatcagcacatcccaaacagaattcaacatatctttctaaaacaatattctcagcacatgattccctgc

SEQ ID NO: 1319 - DNA, 486 bp, Homo sapiens
aggggtggtttcccccatactgttctcatggtggtgattaaggctggcgatagctggtggttttataaagggcagttcccctgcacacgctctcttgcctgctgccatgtgagacgtccctttgcccctccttcgtcttccgccatgattgcgaggcctccctagccatgtggagctgtaagtccatgaaacctatttcctttacaaattacccagtcctgggtatgtctttattggcagcatgagaacagactaatacgtgagcccacgctgctccaggccctgggattcagcaacagacgagaacaacccaaaatctatgttctcttgaacttacattctaattgggcggtggggaagatgtatatgaagttactacccacatgaagaattaactacatatgtaaagaatttctaatgttaggagaaaatgcttaagaaaacaggtttaattggccgggtgcggtggcttacgcctgtaatccc

SEQ ID NO: 1320 - DNA, 527 bp, Homo sapiens
gaaggggggcaacctgatggggtcccttttcaagctgtggaacctttgttctttctctgtttgcaataaatcttgccactgctcactctttgggtccacactgcttttatgagctgtaacactcaccgcgaaggtccgcagcttcactcctgaagccagcgagaccacgagcctactgggaggaacgaacaactcccgacgcgccgccttaagagctgtaacactcaccgcgaaggtctgcagcttcactcctgagccagcgagaccacgaacccaccagaaggaaaaaactccgaacacatctgaacatcagaagcaacaaactccggacacgccgcctttaagaactgtaacactcactgcgagggtccgcggcttcattcttgaagtgagtgagaccaagaacccaccagttctggacacaatttcaagtcctcaggtgccatcaatattctgaaaatggcagtgatttttattcaacctgtataaggcactttcaccatgtacctggaagcaacatctacatc

SEQ ID NO: 1321 - DNA, 595 bp, Homo sapiens
ccagtgatgccaattttccctttctcatagcagtgaatttgatgagctcatatagaacttttgctcttcttcagaatgcctgcacacagtttgtagtttttaaaatatttgattagcgttttttcctactttaccagaagcttcatgagagcagggacctattctccttttgttcaccactgtgtctgtagcactgagcacagtgcctgatataaagtaaatgttcaataaatatttattgaaagagtgaatgggtaaatgatgggacctaaaaaattgtggctaatcaaagacaagaaatggtttagcaatttatgatttccctacagttaaagaatcattgtctttttgagacatattcttaccagatatcttgtctttgcaacccaagagaaagaacagaattccaatatttgagatttaaatatgtttactattgcctaatgtctaaggtcctttaagagtaatctatcaagtatatgttagcataccttctttactatcatttttctgagttcaaatttacagatgcactgtatcaaatcacagtaaactacagtgatgttggctgtctgactgccttttggcatcctac

SEQ ID NO: 1322 - DNA, 531 bp, Homo sapiens
ggacacactaaaactcccacagaagggggaaaattagaaaaggggtgatataatttgactctgtgtcaccacccaaatctcatcttgaattgtaatccccgtaatttctcacctggcaagagtgggaccaggtggagacaattggatcatgggggcagttttccccatgctcttctcgtgataatgattgagtctcatgggatctgatgattctataagtgtctggcttttctcctacttgcactcactccatcctgccaccctgcgaggaaggtgcctgcttcttctttgccttccgctgtgagtgtgagtctcctgaggcctccccagcaatgtggaactgatacgtcatggaacagagggcaacctgcctcctggaaatgtggagtgtctagggagtcacagctgagatcttccttggattaaaggctgcgggtgtcacaaacaggtaggaatattcaagtggtaatcttgaagaattactggaagctgagggtagtctaagatgtgaatgaaaacctcctgtgggcc

SEQ ID NO: 1323 - DNA, 522 bp, Homo sapiens
agctatagttctatatatgattagtagtgaatatgaaagaatttttactggtactgaatgcaagagtgagtcttaaactaaaatagtaactgttgttttccggtatttcaggtggaaatgcttaaagaatgtgtctagggataagactattgactggactacatgatttttataatctctactaaaattctgtaacttaacagttttgtgctccatagcttgtaatattatggttccagcatgcttccactgcatggctctgctgaccataacttgtgactttataaacaagatttatgttagttaaaagtagaaggctgggtgcaatgactcatgcctgtaatcccagcactttgggaggccgaggcaggcagatcacctgagatcaggagttcgagaccagcctggccaacctggtgaaaccccgtctctactaaaaatacaaaaattagctgggtgtggtggcacacacctgtaatcccagctactcaggatgctgaggcaggagaatcgtttgaacct

SEQ ID NO: 1324 - DNA, 491 bp, Homo sapiens
cgacagaagggtattggtcacaaagtgggtgttatagaaatttgggactggccgagcatggtggctcacgcctctaatcccagcactttgggaggctgaggtgggcagatcacctgaggtcaggagtttgagaccagcctggctaacatggtgaaaccccgtctctactaaaaatacaaaaattagccaggcgtggtggtgcacacctgtaatctcagccactcagaaggctgaggcacaagaattgcttgaactggggaggtggaggttgcagtgagccaagatggtgccagtgtactccagactgggcaacagagtgagactctgtccaccccccacccccaaaaaaagaaatttgggactatattttaaaaatacaaagaaggccaggtgtggtggctcacgcctgtaatcccagcactttgggaggcccaggtgggtggatcacttgaggtcaggagtttgagaccagcctggccaacatggtgaaa

SEQ ID NO: 1325 - DNA, 455 bp, Homo sapiens
aaatttacctcaaaattctaaccatcacgctcttgatagtcactggttaaaaaaacaaacaaataaacaaacaaaagcaaactcgtctttcccaattttcccttagagtttcttaatcaacatagttgctcttagattcaggttcagacatctccaaatgaacatgtgaaaatgcaactcttgatttttctaaacagttatacatactacagccatggtgatcatcttaaaacagtagcagaccaatggttctcaaaagttactagatattagaattatgtggagagtttttaaaaagtaactgatgcccatattcttaaccaagtgtattagtttgttttcacactgctataaagacatacttgagacagggtaatttataaataaaagaggtttaattaactcacagttcctcatggctggggaggcctcaggaaacttacaatcatggtgga

SEQ ID NO: 1326 - DNA, 360 bp, Homo sapiens
acagaagggtatgatggaatggtagccttaaaaagtgataaaattctgacacatgctgtaacacagatgaaccctgaagacattatactaagtgaaataagccacaacaaataacaatacaaagtaacaaacagttggatcagagccacaccctgatgaccttcaggtggatcacctcaggaagcctgaggtcaggagtttgagaccagcctgcccaacatggagtaacccagtctctactaaaaatacaaaacattaactgggtgtggtggctggttcaaacttcattatctccataaaggccctttctccaaatacagtcacactgggggttggggctttaacatatgaattctgagt

SEQ ID NO: 1327 - DNA, 613 bp, Homo sapiens
acagaggggtttttgagtgcctgatgaacatccccataatttcagcttcaactagtgcattgaactaatctttacttttcttaccatgatacagtctcagaaaattgtaacatctgcagaaagcaaatgcataaagaatgtatgtatgcaccctacaaacaggtcataaaatgtacttttttagctaccatgatgtatttggagtcaaaagaattctacctgtcactctacttgttagttatgtgactctaaacagattactcaagcctggtttgttcagactataggctgggatcataatacttgcagagctacactgaaattgaaaagtccatattagccaggtgtggtggctcacacctgtaatctcagcactttcagaggcctccacaggagaatcactggagcccaggagttggaggctgcagtaagctataattgcaccactgcactctagcctggccaacagagcaagaccctgtctcataaaaataaaacaaaagtaccagttatatatccttattcaaaatgcctaggacaccagaagtgtttcagattttgaatttattcagattttggaatatttgcatttcccagttgagcattcctaatc

SEQ ID NO: 1328 - DNA, 268 bp, Homo sapiens
cgacagaaggggcagttcccctgcacacgctctcttgcctgctgccatgtgagacgtccctttgcccctccttcgtcttccgccatgattgcgaggcctccctagccatgtggagctgtaagtccatgaaacctatttcctttacaaattacccagtcctgggtatgtctttattggcagcatgagaacagactaatacgtgagcccacgctgctccaggccctgggattcagcaacagacgagaacaacccaaaatctatgttctct

SEQ ID NO: 1329 - DNA, 675 bp, Homo sapiens
gcttgttcttttggccgagcggcctacggctgcgagaagagacagaggggcatgaatgatttttgctattttcctcagccccagaaaaatgggccagataaagactatttcttttgctagattccagaatgaagaagatgcctgtagccaacctgtagctgacaacaaaaatgagaaatacattttgcgctgtctgttgaacccaagaccctttcagagtaaaactaatttaataatcataagtactttctttcactgtgttgacatttgcactttggctcaaaagtgatgttttggaaaacttgctggttaggaaaaaatcagtgcagtttcttcaaactatgttctgcagcaccatcaccacatatttatagtaaacgaagttttacttggtcgggcatcgtggctcatccctgtaatcccagcactttgagaggctgaggcaggagaattgcttgagcacaggagtttgagaccagcctgggcaacatagggagacctcgtctctataaaaaaaccaaaaatgttagctgggcatggtgatgcgtgcctgtagtcccagctacttaggaggctgagctgtggtgatcccttgagtccaggaggttgaggctgcagtgagccaaaatcacgccatcgcactccaggctgggtgatagagtaagactacatctc

SEQ ID NO: 1330 - DNA, 618 bp, Homo sapiens
aacataggggttgcttccagtttagggctattaagaattattctgctataaacattcttgtagatcatttcaatgagcatatggatacatttcttttggataaatacctaggaatgtgataggtgagactatgtttagctttagtagagattttcaaacagttttctacaaggtttgtaccaatatgcactctcagcagtagcatgtaagagttctgattgctccacatcttccccaacattttatattgcctgtctttttcatcttagccatcctggtgaatatgtagtagtgtctcaatgggattttaatctgcataccttttatgaataagaagatggacagttttatatatttgctgggtatatgggtgtcctattttgtgacatacctctgtgtaataaatgtttcatttaaagagcagttgcatgtccattttgtatatgtgtccccaacctcagcagtcattgtccttttaacctgttttcaatttactcctacagtcattatcataatagtagccagtggcctattaattctcagctattacagtcatatttttttcattactatgtattgtggagctttatactgttacaattattacttatattatta

SEQ ID NO: 1331 - DNA, 543 bp, Homo sapiens
gacagaagggattctttattttcccaaagaaatatatttggaatccagctttgtattttcaacagtatcaacaagggtcaatttagcacaaaagatatcagagcaatttgttgagcttccagtgttttgcttgcaatgtacaaagctgggtatcaaaagtataccagtagcagcaaattagttacaaattaacaggaagcaaacagagtgttggccttgattaagctctccatggatcatgttaattactttattttttatttgtactattctacagtgtaacggttttagatgcaatgattatataaatgactgtctacacaacctacctcatttttttttatgttgtaggaaaagaaatcatttaaaaagtatgagctgaggctgggtgtggtggcttaaacccataatcccagcaccttgggaggccgaggtgggtggattgcttgagcccaggagttcgagaccggcctgggcaacatggcgaaaccccgtctctactaaaaatacaaatattggctgggtgtggtggtgcgtgcctgt

SEQ ID NO: 1332 - DNA, 662 bp, Homo sapiens
acagaagggattttctttcattgccttggttgtgtttacactctgttggttgtttgctttgatggatagatgtttttaagtttgatgtagtccagtttgtctgtttttgtttctgttgcctatgtttttgatgtcatatctcaaagtcattatttaagcatagattcccatatgtaaaattagtaagtctcaaagatatttgggggtggagatactagtaatagtagtaataagcccagatattttggagttgtttgataagtctggccagattgccttcagcacacagtcatcaattcaatctccagtctgaaatgtctggaattgcctatttcacatcaccagtgccagcactgggcactgacatttaagtttcttttctgctaaattgacaggttaaaagtaaagattggctgggcatggttgctcacgcctgtaatcccagcactttgggaggctgaggtgggcggatcacaaggtcaggagtttgagaccagcctggccaatatggcaaaaccccatctctactaaaaatacaaaaattagctcagtgtggtggtgggcgcctgtagtcccagctacttgggaggctgaggcaggagaatcacttgaacccgggaggcggaggttatagtgagctggattgcgccactgcacttcag

SEQ ID NO: 1333 - DNA, 418 bp, Homo sapiens
acgacagaagggctatagtaggagtttatgtttagtacacatttaataggcatctgtcatgtatcagcactaaaagtacagtgatgcacacactctcagcctttgtggtgcttacaactggctgatggagaacaacaattaaacaagcagtaacaataaagtgtggtaagtgctatgactgggttggccatgaggagttaggagagcattggcatggcttctgatctagcttaggagatcagaggaagtgagggccaatcccaagcttgaaagctgattaggagctaaaggggcagggaggagctaaggagaagaaaagggtttcagatggggataactagttatgaaaagtcttatttgagaatgtgagagaattacaatatggctggagctctcggacgagaagtgtggtttagca

SEQ ID NO: 1334 - DNA, 475 bp, Homo sapiens
cagtagcaactacgcttacattgtgaaccccagttctgtgaggactctcctctgttcctctaggctctgaaaaccccatcacttctcttttgttccttaagccctagagggggtggtaattatatccaactttgtaatcaattatttgagtctaattttctttgcttgatataacttgtgtggttcttgtttttttccagttggtccctgagcgacccattaactgacttaataacttaatagagaagagaaaactgaagcctgtttagatgaggaaataaacatgaagtgagaagactgaagccacaaaacatcagaaagtgtcagaaactgtaaacatgaggaacctgtgaagatgaggacaggggtgggatgaatagagaaggcctgagagtgtgtcttagaagcagttatattctacatattcttttccttttccatacagaaggatgaacgtttttacatggctgtggca

SEQ ID NO: 1335 - DNA, 473 bp, Homo sapiens
acgacagaagggatttatatgttttggatataagtccagatacgcaatgtactttgttctcccaagagtatttttgaaaagcagtttaaaatttcttgtgtaatcaagtttatcatttttttcttttatggctcttccttttggtttatattcctcctataagtttaattgctttagattttacatttctaggtccattttaggttagtttttgtataaggtatgaaatatggatcaaagttattttcattttgtgcataggaatctgcagctattgcagcactgtttgttgaaagacttctctctgctgcgttgcctttgcacctttctcagaagtcgtttgtccacgtaggtctggatttatttttggactgtctgttctgttcattgatgcgctagcccgctttgactccagtagtgcactgcttggattgtcagcagagcttgcttcattgtgctactcttcattgtgc

SEQ ID NO: 1336 - DNA, 489 bp, Homo sapiens
acagaagggcaatttatgttatgtgaaaaataatatatctcattaagatgtttcattattaatagaatgtaattatgtacatctcataattgcatctgtaatcatgcgttataagtgcattattattttctattgttacacctccttttttctaatttcaagtatttagtttcattttttgaaattggtggcgttttatttatttattttttgagatggagtctcactcttttgctcaggctcatagaaacaattcatcattgatccaaatgtcattatgtggcacatgactgaatatatgtttctacagtggttttggtggcagggtttgttttatttgtgtgtgtgtgtgtgtgtgtgtgtgtgtgtgtgtgtgtgttctgagacagagtcatactccattgtccaggctggggtgcagagatacgatctcggctcactgcaatatccacttcccgggttcaagcaattctcctgcctcagcctctc

SEQ ID NO: 1337 - DNA, 579 bp, Homo sapiens
acagaaggggcgttcctggaagcatgcgaggcaggcaggagccccacagctcccctccacaccaattcatctgcacaggaatatgggattgcgaataagaaataagctttattgtgttacacaactgaggcttgggagactgcttgttgcagctcttcctgttaggctgctctgactcatacagcatcttagtgtgcttcctggcagggcacaggtcacgaggctgtgggcacctgacaaaatggtatggaggctggtgcctctaagagcatcctcccctgggtctggtacacaaggtctctgtgcctccaccccatgtctccgcctatagaggcttttccctctcttagcccccggggctcccactctccaggcagtcaccctgggacatgtgccacagctgtcctccccttgggctcttgtgtgcgctgtttcctttcctttcctcaaaatacctgtctttcctcggccgggcacggtggctcacacctgtaatcccagcactttgggaggccaaggtgggcagatcacgaggtcaggagatcgagaccatcctggctaacacggtgaaaccccgtc

SEQ ID NO: 1338 - DNA, 591 bp, Homo sapiens
  misc_feature 131: n = A,T,C or G
gcttgttcttttggccgagcggcctacggctgcgagaagagacagaagggctgactcaaatgcctgttgccttttccaggtccccatctcagcacctgcctcaggctgcagtgccactagtttacacacgnggaaaacagtttctagaaacgatttctttttatttttattttgagacggcggggtctcgctctgtcacccaggctggagtgcagtggcgcaatattggttcactgccacctgttcctctcaggctcaagagaccctcccacctcagccttttgaagtagctgggaccacaggtgtgtgccaccaaacccggttaattttttgtgtttttggtaaagatggggttttaccatgttgcccggacaggtctcggactcctgagctcaggcaattctcctgccttggcctcccaaagtgctggaattacaggtatgagttaccatgctcagcctctaaataaataggctgggtgcggtggctcaggtcagtaatcccagcactttgggaggccgaggtgggcggatcatctgaggtcgggagttcgagaccagcctggccaacatggagaaaccctgtctctac

SEQ ID NO: 1339 - DNA, 535 bp, Homo sapiens
actctataactttgtttctctcaaactttttggccacagatgtgtcattctaacttttattttaatgattaaatgttgttcggaaaggatatgtgaaatattccactagggaaatgtgagaatggtgaatatgggttgaaattgtcaacttctttcatgtagttaacctaaggagaaatactaatctctcttttctgactttcttgaatacggagtttagcatgaatgtttaagcactgctatttcctgtttgtttgatttttgaggagttcatacattctaaactaatgccaaagggaaaaatttacctctgaaattctcctgatttgaaacttaattaaatggtttgcacaaaaacaaaataatctgacattgctttgtccctttctaattatatataactatctatacacatacacacccacacacacacacacacacacacatatatataatacatatatacatacatatatttatactaaacagggacattggagaccaggcatggtggctcatgcccataaccccagca

SEQ ID NO: 1340 - DNA, 516 bp, Homo sapiens
gcattataattcagacaaaaacagaagaggttaccaaccaactcaagaaaaaggcaagctcatcttgctttttgcatactttattcaaagtcaagcttcctagaggcctgagctgaaaaatgtgttagagtgaaaatggtttgccatggtctgtaactgtcaatatgttactgtcacaattatatcataaaaactagtaggagcaaatactgtaaaagcaaaagattgcttatgcattaagtagactaaacatctttccctttacttctcatttacttcttcatccaaaatttattgagacctactatgtggctgacattgtgccggatgtttgcacaatgttataaacagcagtctcaccatcatggtgcattatactaaatggatactaaataatgtttcagccacaaggtaattttcattgcatcatacaggttgacaggatgttatagtgctagactctcagttgttacttcagtaaacattcactatggaaaaattgtgctatagaactgt

SEQ ID NO: 1341 - DNA, 679 bp, Homo sapiens
atccactgtttcttttttatgaaaacaagtttatctgcccactgcactccaattcaattactcaaagactctttcccagagtgttttaaggcaagaagaaagctttggagtcatctctcaatagttgcttcttaaattaacactattgacatttggagttggataattctatgcagtgggggactggactgggtattgtagtatggttagtgagcctctatccactagttgcaagtggcactgcccccttcagtggtaataaaaaaatatgtctctagaaactgccaaatcacccttgttgagaaccactactctagtcaattgtatctttactctctccttctttgttgggatttaagggtgaaaattcatcgcatgccttcctgagttggggccagttgagaaacaaaaacagaacttgaaaacatggccatcagaatataatttcactgttgctaaagctggtcccagtgcacaagtaggaatgcttctcctgggagatgtttgggttgtgattaacaataggtgaatgaattctggctttaaactaacacagaaacagaaaaccaaatactgcatgttctcacttgtaagtggaagctaaatgatgagaacacgtggacacaaagaggggaacaacagacgctggggcctacctgagggtagagggtacaggagc

SEQ ID NO: 1342 - DNA, 660 bp, Homo sapiens
cgacagaaggggagcacagtggcgcgatctccgctcactgcaagctccgcctcccaggttcacaccattcttctgcctcagcctcctgagtagctgggactacaggcacctgccaccacgcccggctaattttttgtatatttagtagagatggggtttcaccgtgttagccaggatggtcttaaactcctgacctcgtgatctgcccacctcggcctcccaaagtgctgggattacaggcgtgagccaccacacctggcccacagtgctaaatatttctacacccatttaaacgcatagaagagtgcttggcctatagcaaacattcctaaatactagctggcattccctgcagaacaattcccccagttgtgttttcctttagaaggctttttgatgtttcatactccaatgtttcataaaatgcacatttctctcaatccaacatttttggctactgattgcataaaatcaatttagtttatgtcccctcaactcaatacaacattttaagcaaaacctatatggataatgacttgagttcactcgacacaaggttgttagaaccatatgaactgggtcaaggaagtaaagttttaggcattttacatcctaacaagttactttgtttcttatacatttgtatgtaggcatttcact

SEQ ID NO: 1343 - DNA, 486 bp, Homo sapiens
cttgttcttttggccgagcggcctacggctgcgagaagagacagaagggggagtataatggttattgtgattgattccctgacacccagtccaccccactatggtcatttcagttgactcccttatgtcaagtccctcctcctaagccactcatggcattcctgtgctccttgctggttatttattagttaaggattggaccattggtttggtcatggctaatgttgagggagcttctatgaaggatttccttgcttctaagaaagacacggagagaaggttgcctttcttcctttggtcattgctgtgtctggttgtgatgcctggaattgctgcagttattttgctacccgcctgagaatgaaattagtatgttctgagctacaggattatctaattctgggtccttctcactttgggctttttatggcatgagatatatatcctcgttgtttgagacaggtttatttgttttgtttacagctg

SEQ ID NO: 1344 - DNA, 564 bp, Homo sapiens
attccagattattttttctgtttcttaatacattctgtgtgtttgcgtgtgtttgtgaacatgtatgtgctaacgtgcttgtgtttgtgaacatgagagtatgtgagactgtgtgtgtgtgtgtgaatgagtgtgtatgtgtgtgtgcgcacaggcgcctgtgtggctcagccttggcccttggctctctggcttctgcaggctctcccacggagcaccctctgctgactctgcagccccgcaggccttcctcgaacagtccatgacaggaagccaggcttcctggggtcctgagtcagcagagcaggaaggaaacaaaggcctcagaaccgcagaagagaaagaaggcagcctgaagacagaaggcgaccctctgaagacaggtctagagacttaacgtatgatgttcctggagtcctgttgcctgtaagggaagcacaaaccctgagttgcactgtgtcctctgacctgtctgatcccaggcaagctcctcggcgtctctctgctacagtttctttgcctgtgaaacagggataataaaatagcctttccatgggctgagca

SEQ ID NO: 1345 - DNA, 575 bp, Homo sapiens
acagaaggggagtgcagtggcgcgagctcagctcactgcaacctccacctcccgggttcaagcgattcccctgcctcagtctcccaagtagctgggattacaggcactcaccaccatgtctggctaattttttgtattttagtagagacagggtttcgccatgttggccaagatgatcttgatctcctgacttcatgatctgcccgcctcggcctcccaaagtgctgggattacaggtgtgagccaccgcacccagccccctctgccttgaaaatactcacagcatcatctcaacagccaatacactgaaacccctctccacactgaagcacagttgtctgtgaagaaaaattagggaagccatagaggaacaatagctcctttgcaaattacagcttcatcagaaggaaagttgaggcaggcatatagtattttattttatacaccacaaacagacaacccctagacttggaattcagaattaacaaaagcattaaatccatcgggctttgagaagggtcaatgttttttcatatgtcttccctgctaccattatttgcataacaaatcgctgc

SEQ ID NO: 1346 - DNA, 444 bp, Homo sapiens
accgaagggatggcataggaagttcttcaaattaaagataaatgataccagaagcaaacaatgatttcataaattaatggagagtgccataattaataaatatgttggcagagattaaaactgtttcttcacttttaatgctttcaaaaaacaatggactgttttatatatatatatgtatatatatacacacacacacatacacacacaaatatatatatacacatatatatacacacatgtatgtaacagatatatatatatataatttggggctaacgcatatgtaaaagtaaaatacgttacaaaaaagtatcaaaaatataaaagaaaatgtgaatttctgttttttatacaaaaagtggtttcatattattttaaagtagatgtggtaagttaaaaatatttattgtgctgggcgcagtggctcactcctgtaatccc

SEQ ID NO: 1347 - DNA, 441 bp, Homo sapiens
agacgacagaaggggcggtggctcacgcctgtaattccagcgctttgggaggctgaggcgggcggatcacctgaggttggtagttcgggaccagcctgaccaacatggagaaaccccgtttcgactaaaaatacaaaatcagccgggcgtggtggtgcatgcctgtaatcccagctacttgggaggctgaggcaggaggattacctgaatccaggaggcggaggttgtggtgagccgagatcacgccattgcactccagcctgggcagcaaaagcaaaactctgtcacaaaaaaaaaaaaaaaaaaaaagggtttaaccaaggaagtgagtgacaaattggctttacatcacttatcattggacccaatacgtccatatggctctgttaatcgttttttcctaataattatttaactgttaaaaaaaaaaaaggttgggcg

SEQ ID NO: 1348 - DNA, 711 bp, Homo sapiens
ttggccgaacggcctacggctgcgagaagagacagaggggcttcctcaaggtagtgtccctggaatgaagccaccagcaacaggagaggaaacagatggggttgtagaaagtaggagcagcaaaagcttctgaacttagtaataagctgtttgccccgggacagaatctcactctgtcacccaggctggagtgcagtggcatgatcttggctcactgcaacctccacctcctgggttcaagcgattctcctgcctcagcctcccgggtagctgggattacagctgcatcgcgagagctcagaagctcagtcaatgcaaaacagaaggcactgagggaaaatttcagatgagaatggacgtaccctctccagaggcaaagaagtttgcaaattactttttgaagccctctctatataattttgaggttaaaaatgctttcctcctgcgaaggagagattttaatctggattgtatgctggagctcaatgattgatccaaatcagagtccagaggcctcatgggaatgatgatcgtcagggctacagtggggcaactgcagatggagcttgcccctctcctccataaatggggaagagcctctcacctccagtgaggttttgtgcataagaaaggggaggcttgttagagacagcagctttgaaaacttaattctccttgccaagaactaatggactatcttcaatgtgcatg

SEQ ID NO: 1349 - DNA, 523 bp, Homo sapiens
agacgacagaaggggtatgtgatttcaaatgtgtttcagacttctgatactcagtgtctttaccagaaaaatgaatttaaagtgaatctaataatacttgtcacatgatgatatagtaagaattaaaataatgcttataaagcactgaggacaataatgttcacagaacacgtgtccagtaaatggtagctatttctatgagtaatatttttattaatggtgtacatggtctcaaaactagttagtgtttgagcaagaatctgaacccaggtcagtcacacatgatagccataccattgacaatagcatggagaatactgatgacactataaggtctagttcagcagattaagacagccacaagctatagcttataatagtgcaatgaaagaggagcatcattgtaatccgagtgggcagaaaaattagttgagagaatatagcttatttcacaagagagaaaatgaaagtatatatggattggagaggatgggtcggaaagattctagagtgaaggcagcac

SEQ ID NO: 1350 - DNA, 520 bp, Homo sapiens
gacgacagaagggcaacaaagggaaagctctccttgaaggtgcagcttgcttctttcttcctttctttctctttctcttctttctttttctttctttctttctttcttctctgtttctttcttttctttttctttctcttctttattttcttctttctctttaattctctctctctctctctctcatatttgagacagagactcactgtgtcatccaggttggagtgcagtggtgcaatcttggctcactgcaacctctacctcccaggctcatgcaatcctacctcagcctgccaagtagctgggaccacaggcgcatgctaccacgcctggctgattttgtatgtgtgtgtgttttttggtagagatggagttttgccgtgttgcccaggctggtctcaaactgggctcaagctatccaccagtttcagcttcccaaaatgctggcctgaacatgcagctttctgataagccttgtctctaaccagtacacccactgttctcatcctcccctgttctt

SEQ ID NO: 1351 - DNA, 611 bp, Homo sapiens
tgcaatattgcaatatttgaaatttttcttttttttttccactcatttttctcctccaatctagtcagtaaaaaatcttactaaatcctggcaacctccatttttttaaactcatttttgctccaaccaagtcagttaaaaatcttaccaaattttagccactggcctctgttctgaggactcctatgagttctgtacttctataaagtcttcacattttgtggggcaagactctgacagggacttctaggcagatgcacttttaaatacaagtcatggtttctgtctaacagtatattacacattaaaacaatcatgagatacactatacaactattagaatggctaatatctaaaaaacctgacagtaacagttactgtcgaggatacagcacaacaggccctctcattcactgctgatgggaatgcaaaatggtatagccattctggaagactgtttggcagctgctttagtatacaactaaatatagccttactatgctatccagtctttatactcctaggtatttacccaacttatttgaaaatatgttgacacaaaagcctgcatgtgaatgtttatagtagttttattcattactgccaaaact

SEQ ID NO: 1352 - DNA, 474 bp, Homo sapiens
cgacagaagggtgcctctggatccctcaaatccagttttcctttctagggcttcaactggaagcttgggattgagtttgggacaaaaaaaaaaacctcaggagggtacatggactcattaaaataagtcccaggtggcccttgccaaactgcagtcaacagccaggagggctgctctttcactgcttgcttaccataagccaaaagctaaggtgaaaactgtggaactgaatcctcctcaaacaagggagagaacagggagtcccttaaaatttgggacctgacctaggaacatgtcttccagaaaaaaaaaaaaaaaaccttaaaaaatttttttgttttcacagggctgggttaactcctaccatgggggaaaaaaaaagtaaaacctttttttattgcagggagggaaaaatccctgggaaaaaagtcttttgctttcatgcaaatgggttccttaaccggggaaaaaaaa

SEQ ID NO: 1353 - DNA, 606 bp, Homo sapiens; identical to SEQ ID NO: 1192
  misc_feature 105: n = A,T,C or G

SEQ ID NO: 1354 - DNA, 792 bp, Homo sapiens
tttggccgagcggcctacggctgcgagaagagacagagggggggtgaaccggcccaggctggtctcgaactcctgggtttaagtgattcccccgcctcagcctcccaaagtgttgggcttacagccttgagccactatgcttggctcaaagatatttttatgaaagccctgggactatagatttagctgattaaatttatagaaaaagtcctgtcatataaactggcaaagtctgttcttaatttaattagccaaatcagacttaacttccgtcagaacatrwskkggttttaattcagataaacacacaaacatacttctctggcacagccttcagaagcatcagtttttgttttgttttgttttgttttttgakacagggtcttgctctgttgcccaggctggagtgcrctggcacaatcacagttcactgcagcctcgacctcccagatccaagcaatcctcccacctaagcctcccaagtagctgggtctataggcgcgtgccaccaccatgcccagctgaattttgtattttttgtacagacagcattttgccatgttgcccaggctggtcccaaacttctagcctcaagcaaccctcctgcctcarcctctcaaagtgctaggattgcagtcctgagctactgccccctaccctctttgcgtcttaagagtcatttaaattttttttgatccttttgtttagtgcctctggagctgcttacaccaaggcaatacgccttgatatactggatggttgagaagcagcctctttttttttttttttttt

SEQ ID NO: 1355 - DNA, 899 bp, Homo sapiens
ggtttggaaacttcctaaatcgctttgctgtgtgtgtttacacgggtgggttttgttttacttgccctgagagcacacgggagtgcagcacrcaccccaacccacatcaactgccattaaagaaaagaaatttcagcccagaatttcatgtccagcaaaattaagcatcataagtgaaggagaaataagatccttttcagacargcaartgctgagggaatttggtatcaccagatctaccttacgagagctcctgaaggaagcactaaatatggaaagaaaagatcatcacctrctactacaaaaacacactgaagtacacagtccaatgatgctaaaaagcaagcacatatgtaagtctgcaaaataaccagctgacagcatgacgacaggataaaatccacacataccattactaaccttaaatgtaaatgggctaaatgctcccattgaaagacacggggcaagctgggtaaagaaccaagacccactggagtatgccgtcttcaagcaacccatctcacgtgcagtgccatacataggctcaaaataaaggaatggagaaaaatatttcaagcaaatggaaaacagaaaaaaggtgttgcactcccagtttctgacaaaacagactctaccaataaagataaaaaaagagaaggacattacaaaggtggtcctgacctttgataaatctcattattgcttgataccaacctgggctatttgtattgcccaaaccaataggataatttgctgaggttgtggagcttctccccttcacagagtccctgatctccgaaaatttggttgagatgtaaggttgattttgctgtacaactccttttttgaagttttactcatttccaacaaggaaggcaagttttcctgcttccattgac

SEQ ID NO: 1356 - DNA, 660 bp, Homo sapiens
  misc_feature 39, 40, 41, 42, 43, 44, 45, 46, 47, 48, 49, 50, 221: n = A,T,C or G
gggtttgccttggaaatagaagaccggtactaccccatnnnnnnnnnnnngactggatccagaaggggttcaactaggaaatgcagaaagaggctttgttcctggaagatgctgttctggtctagttttaagtgctgtccacgtaagtgtgaaatgaaaatcaatcttggggcccccaaatcactaagctaaaggcaaaagtcaagctgggaactgcttanggcaaacctgattttattcaaagtcaccgctctgcttgcttatgagataaatctgtatcagattgcctcttttagagaggctcattagaaacgcaaaagaatgcaacctttcgtctctacctatgacctggaagccccctcccaccttccagttgtcccaccttcgcctggcattgtcccacctttccagatggaaccagtgtacatcttatacatattgattgatggctcgtgtgtccctaaaatgtataaaaccaagctgtgcccctaccaccttgggcacaggtggtcaggactcgcctgaggcggtgtcacagacgtgcatccgcagtcttggcaaaattcactttcctaattaactgagacctttctctagatattcggggttcaaataaggatgaataagaagaagcagagtgggaacaatgcagtcttgggc

SEQ ID NO: 1357 - DNA, 718 bp, Homo sapiens
  misc_feature 660: n = A,T,C or G
acagagggggatctcagactgctgtgctagcaatcagcgagactccgggggcgtaggaccctccgagccaggtgcgggatgtaatctcctggtgcgccgttttttaagccgatctgaaaaacgcaatattcgggtgggagtgatccgattttccagtgagatgaacccggkrcctcagatggaaatgcagaaatcacccgtcttcygcgtcgctcacgctgggagctgtagaccggagctgttcctattcggccatcttggctcctccgcctcagagccaggtgcaagttgataaaagaattctggaaattgaaggccaaggragagtgactcaaaaataagaagcaggctgaaaaatgagatgaggagaccgaggctcggagaggcttatgcatttgcccaagactctacaactccacaacttaacaggcaattgcatctagcatataatgtgttggttatccccagaacacagagcagtgcatctccacagcgagaattccagaacagggtaatcatcaagaatcaaatggcttggatctggtctcttctctttgaggaagcaagcaggcatggaggtgagtcaggccattggaagatttcctgtggctgatgaagaatccaactccaggttgctcttctttgaagaggattccaganatgcttaggggctgcttgtttggactgtaggagcttagctgagcaccaagcaccagca

SEQ ID NO: 1358 - DNA, 501 bp, Homo sapiens
acgacagaagggctatagtaggagtttatgtttagtacacatttaataggcatctgtcatgtatcagcactaaaagtacagtgatgcacacactctcagcctttgtggtgcttacaactggctgatggagaacaacaattaaacaagcartaacaataaagtgtggtaagtgctatgactgggttggccatgaggagttaggagagcattggcatggcttctgatctagcttaggagatcagaggaagtgagggccaatcccaagcttgaaagctgattaggagctaaaggggcagggaggagctaaggagaagaaaagggtttcagatggggataactagttatgaaaagtcttatttgagaatgtgagagaattacaatatggctggagctctcrgacgagaagtgtggtttagcaagaaataaagctagcccaggcacagtggtacacacttgtaatctcagcactttgggaagccatggcaggtgaattgcttgact

SEQ ID NO: 1359 - DNA, 529 bp, Homo sapiens
  misc_feature 285: n = A,T,C or G
mgragggwwatttttaaatgtgaaagcaggcaatattatcttgtaggtattgtattatattacaagagccaaagcatgctgattcccaatttcatccagtatgacttgtcttagaaaaagaaataaaaatgcagatccatttattcacttattaactgagtacatttcctgaatccatgtgcacgttgggtgataggaagctgakgccctgctggctaaagatgtaagataacagagcctaaaactggcacaccagctggaaattaggagggcaagtttccctanaaatgggagaaccacagataggatgaaccccaaaatctgaatataaactctttccaaatacttggctgaccaccaacttatgcaaacataagggagacttcagtaggccagcctgaaacaaagcaactgcagaagctgaaaaatttagggatttgtcagttgctgcatatcacaggaratcagagcttgtagtttgagtccaggtcagctaacttcttaccagaacaataagccaatgatcacc

SEQ ID NO: 1360 - DNA, 528 bp, Homo sapiens
gcagttctgtagtcatattgatacccacttttaattatrkgaaaattaaggggtggatcatgcagacatttctagaaaaggtgtgacaacttccgggtcatcgggtcattgtcatggaaagtggtggtaacttctgggtgttgccatggcaatggcaaactgacatggcaccctggtcagtgtgtcttatgggaaagtgtttttgccccatccctgttttagttaatcatcaattaggtctggtgtccaagcctcacctccagaatccagtactgcctcctacctcattagaattgttttcactgtgygtcaacatgatcattcctctgttttaacaagggaataaacttaatgaacttcaacttcaggggattttttttttaaatgcaatttgaggrccgggcgcggtggctcacgcctgtaatcccagcactttgggaagccgaggcgggcggatcacgaagtcaggagatcgagaccatcctggctaacatggagaaaccccgtctctactaaaaataaaaaaaa

SEQ ID NO: 1361 - DNA, 556 bp, Homo sapiens; identical to SEQ ID NO: 1157

SEQ ID NO: 1362 - DNA, 419 bp, Homo sapiens; identical to SEQ ID NO: 309

SEQ ID NO: 1363 - DNA, 862 bp, Homo sapiens
ttttgattgtacttctaggtgaacagtattcccacagctcatagacaaggtacctaaatgaagttcttggttggagagagaacagcaaactagaaatatgaataaataaagatgtgtgtgaggtgagaatggcatggtttggatagtaataacttctcttagtcctcaactcctaaaacatgaagattttatttcttgaatataaacttgtcaagagctaacttaaagtacaggttgaatgagttaaacattgccactgcactctagctgcmcagagskgagattgcgccactgcactccagcctgggcagctagagtgaaacaatgtctcaacaacaaaaaagaaaaaagtagatattgctggtagctctgtttttgcctttcaggagcacttctgaagagaatgaggcttttttgagaggaaggaggattaatcatgaggacatgctttggaaggccagagtttgctgtcccgtaaagagattgtggtagagattttattttcagttggattaagtctagaatcacattgatagtgatttacattgcctgaagtagggaatttgctctttaggttggtcaattaattaggtccgyattctagatttgctagaaaaaggagcaactcacttgaagagctttgtggtggttgctcttatttcatatcctcacatgtttcatgattaaggatgaaaattgggcctggtgttgtrgctcacacctgtattcccagcactttgggaggcaggggtgggcaggtcgcttgagcccaggagttcaagaccagcytgggcaacatggcaaaaccttgtttctacccaaaaaaacaaaacaaaacaaaattaactgggcttggtggtgc

SEQ ID NO: 1364 - DNA, 882 bp, Homo sapiens
ggtatatgttgatatgtgatattacttttatttaaattcactggtttccatttgtgtttatgtatgtgtgtattttatattaaaatatttgattaagtaggatcttaaaatactattggatatcttctatgttccggggactattctagacattggaaatacatcagtgaaataaagtacttaaaacccctgccttattggaacttacattctagatggaggaagtttattataaacataattaataagtgtaccatatagtatgttagaaggacaatggaggaaaatagagcaggtaaaagtgattgggaaacctaggcatcattgagaaggtgacatttgggcaaaatgtcacttgaagagtgagaaggagtgagccacgtatttatatctaggggaagagcatttggggcagakagaaaaccagtacaaagactctgaagcagaagcatcagacctagtatgttcaaggatcttaagaagaccagtgtagcgggrgtggagtgaccagtggagagaagagtagtagataaggtcagccaggaaattgaggaggatatttaaaaggaaaaggttatttctggttattgtgttgagcatatgccatcagtagaaaccagaagaacagttaaaaagctatggcagtaagaaaggtgagaggtggtggtggcttaaacaaggatgggagcagtggaggtggtttaaaaaaaaaaaaagkgatgkgattctaratatatatttgaaggtgcagccagtaggactttataagtcttagggcctgaccatttaaaaattgtgatgtttggggccctttttcttaatacataatttaaaatgacagtaggtcatcgtacttatcacgtcttttccattctcatgttt

SEQ ID NO: 1365 - DNA, 716 bp, Homo sapiens
taagtctggtttgcattgaaataagcatgcagtaatatgccttttgccttaccaacttgtatttgcacacaggcaacacagattsaccatttcacttcctaccacgaactaaaagaattgtatctcttcaacaaacaccactttatttttaaccttttttttttattgtggtaaaatgtatactacataaaatgtgccagtgtaaccattttaaaacatacaattcagcggcattaagtacattcacagtactatgcaaccataaacactatttccaaatctttttaatgactccaatctgaaactctatatccattaaacaataactcagattccctgtcccccaaacctgtggtaatctcaagtctactttctatctctatgaatttgcctactctagatatttcacataaatacaatcacactgtgtttgtcttttcgtgtctggcttatttcactcagcatgttgtcaaggttcattcatgttgtagcatgtatcagtacttcattcttgtttctgccagaataatattccatggcatggtcataccacattttgcttatccatttatttgttgaacacttgagttgcttctgcctgttggataaagtaagtaatgttgttctgaacattggcatacagtgtttgtcaatatacaaacattggcatataatgtttgagtccctgctttcaattcttttgggatatataccca

SEQ ID NO: 1366 - DNA, 625 bp, Homo sapiens
gcgaggtyrgsmgwkcgagmcyacgkctggccrasakaskrmagmsskgtctctactaaaawwaaaagaaattagctgggtgtggtggtgtgcgcctgtrrtctcakctacttgggaggctgaggcrggagarttgtgtgagcccgggaggcagaggatgcaktgagccgagattgcaccattgcactccascccaggtgatagtgagagactccgtctgttctgtagatttctgaagacaggtgaaactgraagagaaagcttagattataccactaaggggcctcagaagakatgggagcaagtctagcaaaatccaataggggggctttgggcctagaattagtgtgaaatcggactagaaatgatgattaattgagggcctatatagagaaaagatctcactcccatatccactcctgtgcatagaggacaaaagcagtaaacatttacacaggggccgggggtgggggttttcttaagaaaattgaaaaaactgtatggtgaggactagggcttggagtgcttacatcaatccccaaagaaaagcatttagagaaccatgagccgtaacattagctccctatactcttacctttaaatgaagtttcataatatacccact

SEQ ID NO: 1367 - DNA, 801 bp, Homo sapiens
gggaatgctgcagctcagccgagcctctgactgcttgagggctgttggagctcctgaaagctgctgctagtctggtgttcctggagcaacacaagccttatgaggaaattgggacaagtttcggttctgttttggtctcagttgtaggggaaggaccatttgtggaggaagacctgagaaagagctttccaggcagatgggacaaaaagcacaaaatgtttgatgcaattgaggaaccaaagaaaggtcagcatgtctagagcacagtggacgtggagaagaaacaagattgaaggggtagtgggcccagaccctataaggccttgtcaacagccatgatctggagcttctatacacattgtagtacatgggaggcagtttttaagcaaagacatgccatggtatgttttacattctggctcttatgaaagcaaatgggatcagcgtgtataccacttaggaggcttgtgcagaggtccagtggcaatgtgatggtgtcttgggccaagtgaaagcacagaagtggggaccagtgttgtattcaggatatatgtagagcgctaagtagtgctaaaagatagagttgggtaagatggtaaggaaaataatgaaatcaaggataatttctaggtcttcagtgtacccagctgagtggtgatactatttattgtaaagacgaaagacttaaggaggtgtggattagcaaagactaggagacagaggaggtagcaaatcattgatgctgttaggccatgttatcttgagaggcctgttacagacacccaaatggggtcattgctt

SEQ ID NO: 1368 - DNA, 573 bp, Homo sapiens
  misc_feature 7, 8, 9, 10, 11, 12, 13, 14, 15, 16, 17, 18, 19, 20: n = A,T,C or G
gcttgtnnnnnnnnnnnnnncggcctacggctgcgagaagagacagaagggaacatcgttagatattttgtactcttttttgtattaagtattcaaaattgggtgtatgttttgccacccacattttsaggacccagtagccacatgtggctagtggctrctgtgacgggcaacacagatatggaacacttgtatcctcacagattattctagtggacagtgcagatctagagctagaggacatgggtttgagtccccactcccccactgtgtaaccttggggaaggttctggacctctcagagcctcaatttatcataaaatgaggataatcataatgccgtggtcctcactggacttgtgcaactaccactgatgtgctactaattactttcatttagtgcattcatacttccacttgggtgttttccacatattattattattttttttttttaagtascgacagggtctcgctctgtcactagggctagtctcgacctcctagcctcgggcaatcttcctgcctcattctcccaaagtgccatgattacaggcatgagccactgcccct

SEQ ID NO: 1369 - DNA, 571 bp, Homo sapiens
aggggacgtcatcggcaaggtaggggcgaggcarswgrkgkggtgcacctgctggcaccagtgaggctccgttccttaaaagaagcagcgggggtagtggacgggcacaggctggacaccaggagagattgggatcagtctcctctcctgctcagcctctgtttcttcatccaaaaataaggggatgagatgaccccctcccttaggttcctctctgagtgtcctcctatgggtaagtcagctcaggacagactgccagctgagcagggagaaaaggagtgcaagagaggaatggcctggatctcaaaagaaaggtttactggacaggatgatgacgttggagcagtattgcccggggtcccatctgcacagggtgagctgcgtggggcagtgttgggagctgcagtcagactccaaagacctcgtttcagttcccactccatctgccgataaacaaccatatcaccttgggcaagtggctcggcctctccaagctttagtgttctcatctgtaaaatggagcaactaatactgtccctgtagaactttacagggtggcgtaagaattgct

SEQ ID NO: 1370 - DNA, 969 bp, Homo sapiens
gggcactgggggtggggaaggagtacagtgtcctgtggaacaagatgcatcagagtaggaatattttctccagctttaaatccagagagcaactgagtgcttctccttgaaacttttgccatctaatactctttaatacatttattttttgcttaaactagtaggaattaggtgtgtttgaaactaagaattttgactgaatgatatggtttggctgtgtccccaccaaatctcatcttgaattgtagttcccattatccccacttttcgtgggagggaccaggtggacatggttgaatcgtgagggcagtttcccccatcgtgtwcwsawgrkagtgagttcttgggagatctgatggttttataaggggcttcaccctttgtagcaggaggagctgcagacaagaacccctcagacactgagttgtagaaggaaaggctttattcagctgggagcatcgggagactcatgtctccagaaaccgagctccctgagtgagcaactcctgtcctttttaagggcttacaactctaagggggtccacttgagagggttgtgatcgattgagcaagcagggggtatgtgactgggggctgcatgcaccggtaatcagaacggaacagaacaggacagggattttcacgatgcttttccatacaatgtctgaaatctatagataacacaaggagttaggtcaggggttgatttttaactaccaggcccagggcacggtgctgggctgtctgcctgtggattccatttctgccttttggtctttacttctttttttggaggcagaaattgggcataagacaatatgaggggtggtttcctcccctaccttcactgggacttcttgccactgccatgtgaaggaaatgtttgcttccccgtccatcctgacttttaagtttcctgaggcttcccaagtcatgctgaggtgtgagtcagttgaacctctttccttt

SEQ ID NO: 1371 - DNA, 663 bp, Homo sapiens
gggaattagaacctaggtcccctgggctgatctcccatgtccattcccttctgctgtttgcgcaggtctaagacaatcacctcttccctcctcccacctcggtcttatctgtgacctcctasckrcctrmrrytkskaramkaykayakacwwkkgttacaggaactgggtcctgctcaagaccccaagagagggttcttggatctcggacaagaaagaattcagggggagtccataaagtgaagtgaaagcaagtttattaagaaagtaaaggaataagagaatggttactccatagacggagcagccctgagggctgctggttgccatttttatggttatgtcatgattacrtgctaaacaaggggtggattgttcatgcctcccctttttaraccgtatagggtaacttcctaacattgccatgccrtttgtaaactgtcatagcgctggtgggagtgtagcagtgaggatgaacagagatcactcttgtggccatcttggttttggtgggttttagctggcttctttattgcaacctgttttgtcatcaagatctttaagacctgtatcttgtgttgacctcctagctcatcctgtgatttggaatgccctaaccatctggaatgcagcccagcaggtcttagcctccttgtacccagc

SEQ ID NO: 1372 - DNA, 388 bp, Homo sapiens
gcggcctacggctgcgagaagagacagaggggtctcctcactataacattagatgtcaaatgaattactttttgccatttttcttacaagatttttgatctcaaaaatgtgtaaatttatttttaactcttcttttttacttgtatctttttagtctaaattgaaaagcaacttttgtctttagagcatttatttctggcatctccattggaagattttttttttttcacacatcatacaaagcattacaggtgaaaagaaatgtaagtaataaaaaagtcttccaagaaaaaaaatgtgcgtgtgtgtgtgtgtgtgtgtgtgtgtgtgcgcgcgcgtgtgtgtgtataaatgaaggcacagaccctgtatgaaaaaagtaaaagtt

SEQ ID NO: 1373 - DNA, 745 bp, Homo sapiens
gaggtcaggttcagattggtgcatgtttaatctcttaccactcattcgagatgacttgcttgttgcagrtattcaacatatggaagtcagctgtttggcattttaagtattattttatgtgatcccacataggagagcttaatatttaaacagttttatgctttagttgattcagagttcacatactctttggaccttagagtatgaaaattgatacatctttaattatcctggtgtagtctaaagaacccaaattttatagccaaagagactatcctgatattttccctggctttgtaaactcggatagattgcttattgttttttgtttgtttgtttgttttttcttgagacagtgtcgctctgtcgcccadgctggagtgcagtgtcgcagtcttggctcactgcaacctcaacctccagggatcaggacctctcatctcagccacccgagtagctggcactacaggcacatgataccacaccccgttaagttttgcatcttttgttttgccatgtttcctgggctggtctcaaaatcctgggctcaagtgatcctcctatcttggcctcccaaagtgctaggattacaggcatgagccaccatgcccagcccattttgggtgttttgtggtattcttgaagtgtctccaaaatttatatttagttttcttattgccattatatatatatatatatttggttacttagtatcataaggaaagaagtttatactttgacagta

SEQ ID NO: 1374 - DNA, 651 bp, Homo sapiens
ggttcctaaagcgaggaaaccaagccgggcgcctcttgcaatggagacggtcatttcttcagaagctccccagctgtggaaaatgagcatcctcaaggtaagtttactgaagaaaggaaactgggcatgaaaacaatagcctgaccctaacaatgtcttcaacaatgcttttgaatctctcccctggaaaaatcaaagcagggccagataatgtgccaaaccacaaaaatcagtgacagtagtttggcaagatcacccaggaataaatcttgggcagagtggggatgattaatatcttcaattatcaaaccacttgagagaaacatctgaggtacaggcaaaacttccataggcaactctgggctggctaccatgttttagaagtcctgggtattttctgcatagtccagaaacagtgctaccaggattttatcacccagcaagctcactaaagccactgaatgtacaccaaaaattatgcaaagggcttggtgcagtggcttacacctgtaatcccagcactttgggaggccraggcaggtggatcacytgagstcacaagttacagaccagtctgatcaacatggtggaaccccatctctactaagtagaaaaaattagctgggcttgatggtgggcgcctataatccc

SEQ ID NO: 1375 - DNA, 659 bp, Homo sapiens
ctttataatggtgcaagtttcatatagccagtgtttaagtctatcatggttsctkyrasaakrkayrsakkkgaccaaaaatagaataaattctcagagaagtatgcactctcatccctagataatctcagtgctagaaaaggtttcatccttgaagtctttcctcttgccctcttgatatgcgatttacaacctcctgtaagctcccagacaaagagtttctctgtgtaggacagtgtcgggcaactcctttacataactgtccacaaaactgtgtttgcagcaaggttctctccttttacttcacatcactacacacttgctaagtctcaagctctttcgttttctttgctattgtaaaactcaacagtattgtacttaagaattttctcttagcattgccttctcagatcacgtgcaagcacgcttcgatcttagactgggttttggaacctagggaactggcaccttatgatttcacgtatatgaacccaacatcccagtggccttctgctccctctgtagcaaacctgaraaccgggagttttgtggagtcctcagtgcttcctattgatgacataggcaattcttcctcatagatccctgggacaaaaacaaaacaaaacaatacaaagcagacactagctggacacaacaga

SEQ ID NO: 1376 - DNA, 926 bp, Homo sapiens
tgaaggtgagcctgaataagttaggtgaaggagcatgagtaaagggaagcatgaatagcatattgcagagcctctgagatgccacatacaggatgactaggagaacctcagtatgcaggacaaagtgactttttggacatttttaggtttcgcatttttattttaagaacagagggaagctaatgaagtgtttaaattagggagtatggctatggcctgatactctgaatggagtatggagaattgattagagactgaatcacttacgaagttctcctggtaatagagattttgatctggtgataaaagtaaggtaggagagatgtgaagagattcaagaaatatttaagatgtagtaataaacaggacttggtggtagattgaatgacacagggattgaggaggaatccagagtataagttgcagtaacaacttcagaattttcttatgtagatagtttagtaataaatagcagtctgcagaggccaggacttgtgtcttaaatcttttgtaaaacaaatacgctgtttttacttacgttatacatttatttatagtgctttgtgggaggtactgttggagattaacaggtgactttttcagccactgcaagagtagctcattttttgattgagcacaactaagtgaatggctattttcttaaataggtagccctggaaaagggatgaagcatgggcggggacgtgtaggggtaggtgatcatgaactcggttttgaatatattgagtttgagttatctgtatgagatacccaggttgaaaatcggttgggtagttgattgtgtggatatagagctcagaaaagatatcagagctcaagaaagaaatttgggagatttttgcatacagatgttaactgaagccatgaagttagatggaattttaactaggatgaaagtagaaaga

SEQ ID NO: 1377 - DNA, 753 bp, Homo sapiens
ggcacccgtccttaggttagtcacttggtgatcattttattccatcacaataacaatttggatgaatcttatagtacttatgctgaatgaaaaattcagtttcaaaggttacatattgcataattcctttaatacaacattcttgaatcagctgaattttaaatagagaatagattagtggttgctagtgagagagaagtaagagtggttctcaagtgaagtcttgtaatgactaaatagcacttttctgagtgatggttacataaaaatatacatgataaarttgcccagaactgtgtgagtacacatgtacacacacacattagcacctttgagtaactataaaactgctgaaatctgaataaaccctttgattgtaccaatgtcaatttctagtttgttgttatgcyattcttatgcaagatgttacaatatggggaaactcgtaaaaagctcatgtgacttagctggatattttcatgttctggtgaatctataattgttctaaaaaaagataaaaaagcaaagaatgggacttattttttatcatgcaacattaataataagaaaacaagaatggatacatgagaagctaacaaagaagactgacaagaaagggatcaccagtgatagataattattccgtaatgtaaaagagccaatttatcaaagagacatacaatctcagttgtaaatatgcaactaacaacaaaatattgaccttcaggagcaaaaccataggaaaggaaagca

SEQ ID NO: 1378 - DNA, 780 bp, Homo sapiens
ggctgtcattgtctagtgcttctccactgtgagacgagttcacttcctattccacaaactgtttttctcactgtttcaaagggagatcctacgacccattgaattttatatcactcgtcttataattcactgttrkawsacsaswgmssrtcctcccagatatctggtctgcaatattgcaatatttgaaatttttcttttttttttccactcatttttctcctccaatctagtcagtaaaaaatcttactaaatcctggcaacctccatttttttaaactcatttttgctccaaccaagtcagttaaaaatcttaccaaattttagccactggcctctgttctgaggactcctatgagttctgtacttctataaagtcttcacattttgtggggcaagactctgacagggacttctaggcagatgcacttttaaatacaagtcatggtttctgtctaacagtatattacacattaaaacaatcatgagatacactatacaactattagaatggctaatatctaaaaaacctgacagtaacagttactgtcgaggatacagcacaacaggccctctcattcactgctgatgggaatgcaaaatggtatagccattctggaagactgtttggcagctgctttagtatacaactaaatatagccttactatgctatccagtctttatactcctaggtatttacccaacttatttgaaaatatgttgacacaaaagcctgcatgtgaatgtttatagtagttttattcattactgccaaaact

SEQ ID NO: 1379 - DNA, 642 bp, Homo sapiens
acagagggggatttgryygakygryytwygagmtgsrrgwwgcagwsagmsrrgatcrcgccactgcactccagcctggcaacagagcaagactctgtctcaaaaaaaagaaaggaaagaacagtgaagttctctgcccttgtatgattccatgataattacaagtgtgtctatccccaaagtttctatgttaatacctctctacttccagttcttagaagggaagaatgaaacaggaaaacttcggctgcttctacttatccagtttataatcttarattttggcatttgggtcaagtttattgcgtctgtcctctattttcctgccataatcactcagaatttcatgatgtttttcctacttcaaagaatatatttcctcccatttaaattaagtattttgttcaatcaacgaacacaggttytttaatattacagtgctagttactatggttaagatttaatactggccagatgcggtggctcacacctgtaatcccagcactttgggaggccgaggcgggtggatcacctgaggtcggaagttccagaccagcctgaccaacatggagaaaccctgtctctactaaaaatacaaaattagccgagcgtggtggcgcatgcctgtaatcccagctactc

SEQ ID NO: 1380 - DNA, 607 bp, Homo sapiens
gtggtggcctcctcgctctgccctacatatgctaggcattctcttgcctctgagtctttgtaattgctgttccctctgcctgggttgctcttcccacatagttcatttccacactccttcaggtcttaatcgaacatcatttgcctctcagtgaggatttcctagtcaccctctcaccctaccaacctttttgtttttttccatagtacattgtcaccaacatgtcacatactttacttaccttggttattatcgtctcacacgttttatcasaatgcaggtatcttgaaaccaaggaattgtgtctgttttgttcactgctgaatccccaatgattggaacaattcctggcatataatagatgctcattaaagaagttttaggagaatgaatggatcaatcaataaacaactactaactggaaaaatataactgccagcatttcatatttgttcacaatgtccatgtgtataatggcattcacaacattgaaacagaggccaaagtactaaaagcatttaaaaggtccctggaaaataataaagatatattgcagtttttgcattgttgggaatttgtcatttcatattggaatacattcttaaat

SEQ ID NO: 1381 - DNA, 1159 bp, Homo sapiens
gggagtctcgctcagtcaccaggctggagtgcagtggcgcgatctcggctcactgcaaccttcacctcccgggttcaagtgattctcctgcctcagcctcccgagtagctgggactacaggcgcgtgccactatgcccaactaattgttgtatttttagtagagacggggtttcaccatgttggccaggatggtctcgatttcttgacctcgtgatccgcccacttcggcctcccaaagtgctgggattataggcgtgagccactgtgccagaacaatgtcaggattttttggcttatctttactgacctggtctaatccccacagatgaatatttattgatttatttttttctctttttggaggaaggaagccctgttgtcagcatcctaaaagctagaaatgagaaaagctgggaatctcaattttcagtgtgtgctttgttttcaatattgtaccctttcctcaattggtctcagtggtctccagtccaaagactctctgttttatcctctacggaaaatgaacattttgtcctttatacagaaatggacatgtggggccgtcttcaaccactcctaaaacactaaaacagacattcaataaatcctsctgttccagccccacttaatcctccaagttacataactgcagattgcagcgctcacataggraaccctgtgagcagcctcctttgaagctggtcatccctccagccttattcccccacactctcaacggtattgtaactaaggacctcagttttwaaaatatacttcagtcatccactctctttatcttccttcctgccgctctcacaccttgattaaaaccattttttccttccacccatccatgtctcttgactctggcttttaggtggcaagctgctggacttaggaccagatacagtatcgtatgtcatgagcctttggggagctcttcagtttacaacttggtggctcaaagatttcctttctactgctttagacagctttttggggggatgtgttttccgaaatcagctgctctttccgtatagaaccatacattgagattacatgagtggctgtgatgtctaatgtaacagaayattysattctctttgtctatattgtttatagaaaaacatctcattgatatgtttctttccccttccc

SEQ ID NO: 1382 - DNA, 780 bp, Homo sapiens
  misc_feature 675: n = A,T,C or G
aaggttgcaacatactcctgrwactgggaaggtgtggcctactctgcctatcaatagtatatcttcacacattcaaatcacaaatatttaactacttctcttttaattataaataaaataaattttatttttgccagttgtccttcaatttaagattaggaattagcaatataattataaaatcaaaagtgatttttatgtcctcatgttataaaggaaatagccacagaatcaactagagtatttgttttaagtgtaaaatgtgaggggaggatgattttttaaattgatacaaaataattatacatgtttatggggtacatcagatatgttgatatatgcatacaatttgtaacgatcacatcagggtaatcaggatgcccgtcacctcaaatatttatcgtttctttgtgttgggaactttccaaatcttctcttctagctattttgaaatatacagtaaattattaactatagtcaccctactgtgctgttgaatactagaacttatttcttctaactgtatttttatacctgttaaccagtctctcttcatcttccctccctcctaccttccccagcctctgataacctcattctactgcaaggagaataatttttattgctagaggcatcccaaaatgtatagactgaaagaagcgggtggatcacgangtcaggagttcaagaccaacctggccaaaatggtgaaaccttgtctctaataaaatacaaaattagccagatgtggtggcgggtgcctgtaatcccatctactcg

SEQ ID NO: 1383 - DNA, 759 bp, Homo sapiens
gggactatttttaataaaaacttctatttcaaaacttttgtctcaaaattatttattgaatgttaaactaaaagccttctataattgcttattttgtttttcacaagtctctcacatttaaaattttgaatttcaaccactttttcatttggaaagtgatgggcaggttacaataaaaatttaaaatacrkgtattctaattccaacaaaatgccagaaagatagcatcaatgccaatgggagaaaaaatagagaagatccaaataaacataagtagaaatgacaaaggggatgttaccactgatcccatagaaagacaaatactccctagagactactatgaacatctctatgcacgcaaactagaaaatctagaagaaattaataaattcctggactcctataaccttccaagactgaaccaggaagaaattgaatcccagaacagactaataatgagttccaaaactgaatcatcatataaagactatcaaccaaaaaaagctcaggaccagatggattcagagctgaattctaccagatgtaaaaaaaagagatagtaccattcctgccaaaactattttaaatattgaggaggacaggctcctctgtaacttattctatgaggccagcatcatcctgataccaaaacctggcagagatgcaacaaaaatagaaaacttcagaccaatatccttgatgaacattgatgcaaaaattctcaacaacaatctagcaaactgaattcagcagcacatc

SEQ ID NO: 1384 - DNA, 954 bp, Homo sapiens
agaagggcaacacctgttgtgctaatctgaaataattttatttcagctaccgtgttcttaatataatttgtctccacattagacgtacaaagagaatataatttaatagtttgaagattatcctttcctgttgtattatgtgtttttcatctaactggctgayatacagcaagttttctctccaattatataattacctaaatagcatgacatctctgattttgcctcttgacccacaaagcctaaaatatttaagattttatcctttttggaaaaggtttgtcaactcctatttcagctgaaggatctaaagcccagaaaagttagatgatgttcccaaggtattggttasatccattttgtgtgtgtgtgtcttttggggtcagactattctgatattgtatggattctggagtatgtctggtttgaatcctacatccacccgttactaccctggtgatctagagcaaatgacttccctttgcctcagtttccttgtttataatatagtattgttgttagcattaaatgagataatatatgtgaaataattacagtgtgctttgcacatggttagtactccagttaactgttagctattgttataattagtgtcaatgtgttgaattcataggctatcctaaagagaagggataaatgttcacatctgatccagtctcattttcttaaaatagcagcgatgttatatcatctgtaatctgaggaaaaactggcatttattcacattcttatttttgtagtatggtttattcatccttcttttcaataactttacaagttaatagaaattatgaacttctaaaatacatgcataatttataatattgattaacttaaacacagagcactcaaatgataaccacatagcacaccttccctgagtccagcagatgatagtgaaaactctttgttctctcatgctgtgtatcttga

SEQ ID NO: 1385 - DNA, 648 bp, Homo sapiens
tcactctagcctacacagtgtcctacactccagggaactggcagtgccattcactagggaggctgcccccagaacaaagggagctgaagcaggcactcttcwcaagtggagwgtcaccttcccaggaccactgacactgacagcwatcctgacccccaggagcagggccactgcacacctgcaggcatcctcaggggayctggggactcacctgcctgggcactattccaggrccagarcacakgcccatcccacccattgctgtcactaccactacccaagstcgttgtccakgamgctggggatcaacccacactgctctctgtcattggcacctgtgcatgccttcttgtgacctgagtatgagcccacccascctggtggtgcctgtgcacattgtctgggagcykggggattaatccaccatgcctatcaccatcaagtrcctgtgtgtctcctgagagcctaaggataggacttccyakcctgccatcacsgctgycaccagtgccmacatatttgcaccatgtgaaagcctgaggactactctgtccatcatgttgccatgactgttggtgtctgcacatgccatctgaggtcccaagagttcacctgctatgactactgcaattgctgatgctacacatg

SEQ ID NO: 1386 - DNA, 664 bp, Homo sapiens
  misc_feature 563: n = A,T,C or G
ggaagagtttaattttgttttctagagtcatttcaatataaagarkwwkkkatacacagcacctattaacatctggaagaaatagtgttccttaragtatactttcagtaacatagcattagcttgtccatttccaaacctacactgttttagaatgagtgttggtaatcatcaggataggcactgggaaaggattggaagcagtgggatttgtttttagggaggtcatagggaatttaaggacttaaagatcaagaaggcatctaatagggttctatgtaaagataagagacaactaaaacaatcaggtaagaaaccttttgatccaataattctgttaaatcttccaagatatgtacatcaaattatataggcatcccttggagctattgcggcttcggttccagaccaccacaatgaagcaaattccacatgaaagcaagtgacacacactttttggttttccaatgcatataaaagttacgtttgggctgggtgtggtagctcacacctataagcctacccctttgggaggctgaggcaggaggattgcttgagcccangagtttgatatcagcctgggcatcatgccaagacctcatctttacaaaaaataaaataactagccaggtatggtggtagcatgtctatgttcccagctacc

SEQ ID NO: 1387 - DNA, 589 bp, Homo sapiens
cctacggctgcgagaagagacagaggggaattgcaatccccttctggctgtctacagagttcatactcttcacaccacagctgggctgctaagggccaaatcctagctctgccttttaccggctttgcaaccttgggcaagttccttcagctctctagactcagtttcctaatctataaaatgggtttataatattactacagagtagtgataaagaatacatgggttagtgtacgcaaaatgctggagacaattaacatatgtgaatcctgtgacctgatacgcacccagcaaacccagcaccctccagctccaccatgacaacacagaagatgctcctctagcccagcaggagaagtcagctgcattgaggcttgaagggtgaataagaattatctgggtaggaaaaggagaacagcctcactggcagagtttttataaaggcaccaaagtctgaaaggcatgaagagtttagagggacccgttaacagtttagaacaactggatgacaattgcgtagaaggaaatggatactgcggataccacggagctcagcaagcaagtttcaccttctaaaggcagtgggtga

SEQ ID NO: 1388 - DNA, 958 bp, Homo sapiens
  misc_feature 896: n = A,T,C or G
gctggagaggactcaggaaggttacaatcatggcggaaggcaaagagaaagcaaggtacatagtgacaggagagagcacaaaacgagaagtgccacacatattcaaataatcagttccttctcatgtcacttcgttctaatcctctgtcatttaattgctctctgaaacagcagagagaggttgtttacttttaaggattcatgtgattaaattaggctcacctggataatccaggctaatctctctagctcaaactcctaactttartcacatttgcaaagtcattgttcccatgcaaagtaatagattcacaggttctgaggattaaaatatgaatatcttggaggggggcattattctgcctatgcagaattttaattatactttccccattttccttctttcttgactgatttttgtcacgatttggaaaattataaatttcccaagaaatgccaggaaggaatttccatatggaaacatggcaatacagcctggaaaacactatggacagttgcatggacctcacagtaaggaaatctaacataagcttcasgctggggagagctttatagacaatggatgtcataaataggtttttgaagaatatgtagtagttatctttgtgaaagttaagggaagagaggattggagccattaattcacaggactgtgattaaactgagacatacacatttcatttttarggggaagttaaaaatagtttagtatgagttcaaatgtaggaggagagggatataaaatttgagagttaagcattggaccgtgtaagtctattctcatgctgttaataaagacatatctgagactgggtaacttataaaggaaagaggtttaattgactcacagttcaggatggctagggaggcctcangaaagttagaatcatggcagaaggggaagcaaccatgcccttcttcacatggtggcagcaag

SEQ ID NO: 1389 - DNA, 616 bp, Homo sapiens
ggcctacggctgcgagaagacgacgagggtacggmykykaraarayswywgmwgggtaygrcwrmkrgawgagmgayagtataagtaaaatgcgtaactcagtgcctaggatcgttgctgaataacgctacctattattattggaaagcattttgggacatttggacttttaagtttactgatacgttttttcagaaaagcagaaaaatcaacaacatggtttcaaatacttggatgaggctccattcactcccttagcccatcttacatatattactgcattgactggaaatgggaggcacttcacaattaggaatattgtcaggtcagccaggcgccgtgggcatgcttatagtccaagctactcacaaggctgaggcaggaggatcgcttgagcctgggagtttgaggctgcagtgagctccagcctgggtgaaagagaagaccctatctcaaaagataaaaaattttaaaaacctgtcaagttagatgttaaagaggacatgtaaaataaaatctccctaacatgtttatgaaatagctgcaaaaggctgagcgtggtggctcacgtctgaaatcccagcactttgtgaagccgaggtgggtggatcacctg

SEQ ID NO: 1390 - DNA, 694 bp, Homo sapiens
gtcaagtgagggttgccagatttagcaaataaaaatacataatgccgattaaactcaaatgtcagataaacaatgaatacttttttagtgtaagtatatcccctgcaatatttgggacacatttgtactaaaaacacaaatgtgttttaatatgaaattcaagtttgagtgggcatcatgtattttatctggcaaccttaaatcaagctgagacctgacaggcaagaaagagtttgcaggtagcaaaaacagaaaacagagttattgtamcyrkwttgsmrrasmrcwgrarrtkkammartgacttcctgaaataagacatcaatgctacatctgccacagaggaaaaaagaaaccgtacatatatgaatgattataatcctcgcccaaggcaggagtctcccagcacgccagaaaaggccataaatccatgcgatatccctgactactgcattttacatctaggactcagagtaactgaaagtgtctctgataactccatcatgaagcctctgctggtcctgccattgctccagatgcatgctggccactgtggctgccatcagcatcaccaccgagaggcccagcagtgccttcaaactcctcgacatctctgtgccagcttccaaggcctctttctcccacctctcaaggctggatacaccaagaaggtggccatctaccagccaggaag

SEQ ID NO: 1391 - DNA, 718 bp, Homo sapiens
ggcaaggaggttgtgtctgtggcaaaatgtgttagtggtcccaaagcattagcagtaggaagagaagwsagcwgrkgggtatgagagatataaggaaggtaaatctcttgacttcgatgtaaggataaagtgatagggaggtatctagagtgacaaacagatttttcacttatgtgattgttagatggcggtaacagagaataggaaaggaagaaacaagatgaagagaaagagaagtccagcttaatacatatgaaatttgacatacccaagtaacatacatttgtagatgtccagtaggcaactggaatgtttaagtttgaggtctgagttctagactggggatcaaaatttgggaatcattagcaatgaaatcatagattggtttgttatcaagtattgattgtaggtatagggttagagaaattgagactatctgaatccctggaaaaaactttccggatagagtaagagattcccccagaaaggaaaataagtgacataaaggtggaaaaaataaaataataagtgttatcacagaaagtataggaaaaagcttcttaagtccactaatgtttatatttaaaaagaactcggataagatagacaatagtgctatttgaacaataattcacaaccatatctgttagtatcatctggagaccttctttaaaaatcaagtaataactggattatgtctaataaatcggaatgcctg

SEQ ID NO: 1392 - DNA, 684 bp, Homo sapiens
tgaaatgtttaactcctaatgctacatgtgaactctaagtctcaggattgcccctgagctatgcacatgcagaacagagccaaataagcacagcaaagtctttgacacttaactactatataaaccactgaccaaagtccctgactaccctgggtggcttatgtacctggaagacctgaacaacaaaggctttgaaractaaactgacaggacaatcaccaaccacagaaggagaaagagaacatgtaggatgaattgaaaccagctgatcatctgctgtaacaaaaacttcaacattctccagattttaacaggacccaatgtcttaaaacataatatgcaaaatgttcaggatataatccaaaattactcaacatacaaagaaccaagaaaagctgaccatttctctagggaaaagaaaatcaacagctacaaaccccaagatgaccmgatattaaaactatcagacaaagattgtgaagtgagaagttcaagaagtccaaccaaccccaaacaggataaactcaaatgcccagacacatcataatgtcatggcaaattgcccaccatatagtcttaaatgaagaaaaacagaatataaaactatacataggatgaaatcaattgtgtctaaaatatgtagatgaaatacttatattacatataaacagaaaaattataaaa

SEQ ID NO: 1393 - DNA, 526 bp, Homo sapiens
ggtaccaagagaccgttaaaataagaaagcatggctgggtgtggtggctcatgcctgtaacctcagcacttcaraaggccaaggtgrgtggactacttgcaccccaaagttcaagaatagcctaggtgacatggtgaaactccttctctacaaaaaaacaaaaattatctgggtatggtcacatgtgcctggagtcccagctacccagaargctgaagtgggaagattacttgagcctaggaggtcgaagctgcagtgagccatgactgcaccactgtactccagcctgggtgacagagcaagaccttgtctcaaaaataaataaataaacaaacaaacaagaaagcacaatacattcagccacaaaacacaggcatcagatatgcaagaatcctgacagcagaaaatggctgaagcacaatatttacaaggcaaagggtttctgactaaaataagacagattctaacaacatactgtttacaagaattaaatctaggcaaggcacatcggctcatgcctgtaata

SEQ ID NO: 1394 - DNA, 918 bp, Homo sapiens
gaccgcgtctggctgcatgaccttttaacttgtctcatacactcaatattctcaagaataccttccaaagtgcaaaattatggcactttgcagccctgaccactaactgagaaccttgatgctttggattttggagacctcattttatcacctggtccttttacttcatgacttgtcatgctgccaccttttgatgggattgagatgaagataataattcccaactggtcaggaatattgtgcccctttgtttttatatccagatgcaatagagcctctgacacaccrctactattgttcttaggatttggaacaaaatgcttmtttctttgacaaaataaatgttttctttaaagaactcttgattgatcctggaccattgtagaaactgaagtcctatcaatgcaaaaaaatatgacaacatgagctgcttatcatgaaataagtgttttccaattaactatcctgcttcatcagcaggtaggaataatagaatctatacctatgtcttcatgggaagttctctatggccagttgattagtgagggaaaaattgagcctgatttacagaagtcactgtacaacatcacagcagcagccaaaagtagattgcttaggcattataacctacgtgaatgcaattttaaaagaaattcagcctatgtaattggttgtccacgatgtctaaaggagagatattattgatgtatatgtggcagctaataatttgtctagataattarggacttggggccaggcctgatggctcacacctgtaatcccagaacttttggaggacaggacaggtggattgtctgakgtcaggagttcgaaaccagcctggctgacatggtgaaactccgtctctactaaaaatacaaaaattagccagatgtggtggtgtgtgcctgcaatcct

SEQ ID NO: 1395 - DNA, 601 bp, Homo sapiens
gggatggaacacgttcagggtcacataatttatttacttttttttctgagacggagtcttgsgyctrykgcysmgagcwrgaskrcagwrgcrsaatcttggctcactgcarcctccgcctcctgggttcaagcaattctcctgcctccrcctcccacgtagctgggattacaggcatgtgccaccatgccaactaatttttgtatttttagtagagacrgggtttcaccatggccagrctggtctcaaactcctgacctcatgatctgcctgcctcggcttcccaaagtgctggtattacaggcatgagccaacgtgcccagccgagagagtcacgtaatttagtggccagtctagggtgaggccccagacctttggactgctaggccattgccttccatttactataccattttattttcatattagttcattttattactacaaatatagaacacacttggtataaacttctaaacagtacagaaatatccagaattaaaacacgagtctcagcctgggcaatatagcaagaccctgtctctaaaaaaatacatatttttttagttagccaggcatggtggcacgtgcctagtctcag

SEQ ID NO: 1396 - DNA, 850 bp, Homo sapiens
gggtgacctttatgtggatgttgactggaaatttaatgctattaaggaactattgttgaaatttctaatatgtgatagtcgaaattacttgtgtttttaagagacctaattttttagaaatgagtttctcaacctcagcactgacactatattttcacatctaggacatgatcctaggaaaagcaatcagaaatgtgaacaaaaacgtgtgcacagaattgttcacaatagggtcatttatagtagaaaaataagcatgtatattttggggacctgtgcaccattcagaggggaatatggagtaaattatggcccattcatacaatagaatattttgcatcttttttatatctccatasatkwkgggggaacaggtggtatttggttacatgagtaagttctttagtggtggtttgtgrgattttggtgcacccatcacccgagcagtatacactacacccaatttgtagtcttttgtcccttttaagtgacatttataaggaattgttactagcatgagtgaaaattcatgcgacacgatagtgagggaaggcagtaacattctctctgtcaatagatattatatatatatgcagtgtgatctcaactatgtaaaaatacctacattcatgtagaaaaggctggattttaaaaaatgaaagattagctaggcacagtggctcacacctgtaatctcagcaattttggaggttgaggcaggtggatcgcttgagcctgggaacatggcaaaaccctgtctctccagaaaatacaaaaattagtcaggcatggaggcatgtgctggcagtaccagctaccctggacgctaaggtgggagaatcactgcagc

SEQ ID NO: 1397 - DNA, 606 bp, Homo sapiens
cagaagggttccctaactcgaggcctggcaccagtttatctcgtgcactctggaaaccaggacttttttttgacatttcactctcccttacctcttcttttcaatctcaccagattctgtttattttttcttctaaatgcctttcaaatttctccacccagctccctttccatttctctccctatcgtctctcatttggagagagcgagagctttttgtctcccaacatccagcacccattccttaaatccgtttctccatcagtctttaagacgttagaagggagagaaacaaagaaaaaagaaaaacttcctttcaatcacatctttctaggttttcactttaagggtaaagactaaaatgtttggcaagattcagcaagccttgtgtgatacagaagatacgctccctcagagaggatccgagtccgttttgtgtattcacatatcccaagtgcctagagcagtgcctaccacagagcttgtgctcagcatatatttgctatggaatctgactcctgctcttgctgtggctcattggcctttcatttccttgaatgtgattttattttacctgggatgctcttcttctccattcttggctgac

SEQ ID NO: 1398 - DNA, 195 bp, Homo sapiens
ggttgaggcccggggctgttttctagttgttattttaggcttgtgtatatccaccaccatgccttaaaaaaaggcctcacattagtaagagctcagtaacatttgctgaatggatgaatgaagtatggtggctttgctatctcttactttacttgttcacttctctcctagcttcattcattcattcattcaaca

SEQ ID NO: 1399 - DNA, 831 bp, Homo sapiens
  misc_feature 706: n = A,T,C or G
cacctatcgccaagcaattacctaccacttccagggtcagagcccttcacttcrkattcatgaggagacggggaattggaatatacccgcagccgacaatctcagtgtgaaatactggtttactgtttggagaacaatagacaatgatcaacaactgaagagctgagctggtcttcatcctgtgccaaaggaatgcggtgtttttcactgctttttaaartaagtaattttcctctggattaaagcaccgaaggcttaaccctgaccttgtgttaagaaggaagttggggtgggaactggaattgaatgcagcaaatttcatccaacagtggagagagggttaaagagaaaactaccaaggaggcttatatttagagcttgataggtttgttaaaatatcctgactttaccctttttatgtatctgtctttcacctaatgtgctttttgtgtgcacactattcaccaagctttgttcaaattgcaagggatacagaaaggactgagaaagtgactggtggatgagaaaaacaaaatatcttggttagatcagtacagctttccttccaagagtttgcatctattatctctacctctctgaaaaatcataacagaaataaaggcatatttttcctactattaagaaaacaaaggtagggctggcgcaatggctcaagcctgtaatctcaacactttgagaggctgangcgggtggatcatctgaggtcaggagttcaagaccagcctggccaacatggtgaaaccccatctgtactaaaaatacaaaaattagctggcatagtgctgggcacctgtaatcccagctactctg

SEQ ID NO: 1400 - DNA, 874 bp, Homo sapiens
gcagtgagccgagattgcgccactgcactccaccccatgacccaagctgctatagtatggtgccatcttgaaattggagccagtgcttgagtgctctgctcatgggaccagtagccacttcatttgtccactcttgaggctccactgtcattccaccatgctcacatgggtgactacaatgccatgatcccagctgctcagtgcctgtggccaggaacagttgtggctctggtgcccacacccatacagcatgctaccccccaaaaaaaaacagatggtcctgtacaatgagggaggcagccctgggctgctgcagtactacatgtccttgctcctgactggaaaaacagcccagcagaccctcacctggcagatgagtgcctgaaccagttgaactggcatgaacctgtgccttcagtakgaaaaaaaaaagctcascaaacctgcctttactaggttcaccccccaagtcaacctgaaaatcagcccatcaagcctaaacctggctaagctgtactcctcttgccacagacgtctacaacctaagccactaaggcactcacagacatggctgacatggattacagctgaagaaattgcatggagactacatcatgtctccacccaaaaccaaagccaacacaccctacccaactagcataacacccatatacaggaataaatcttcccctaaaaagctactccataaaattggaacaggtgactattcaaccaaatgtgcagattcagcataggaacacaaatatgaaaagcaaggaaacatgacatccccagaggaacacagtaattcttcagtgacagaatccaaagaagaggaaattgacaatatgcccataaagaaattcaaaataat

SEQ ID NO: 1401 - DNA, 478 bp, Homo sapiens; identical to SEQ ID NO: 355

SEQ ID NO: 1402 - DNA, 599 bp, Homo sapiens
gctctagtgctaaggcatgcccacttctggggttcactattaacaaattcatttggctagtgtatctaaagcttctgttaataacaaaagtgttattttattctgttttgtttctcgtcttgttcatagcttaaccaaggaaggagttgtctgtttttgggtgctgcctttatacaccttatactattttatttaattttgcattaacttttattatttttgcgtgtgtgtgtgtgtgtgtgtgtgtgtgtgtgtatgtaatgtctggaaggatatgcatcatagttttaaaagggattggaaaaaggattcrwaaaattaagaggtttttccttgtctgyacttctaaattcatggaatwtattagatatgtagytcagaaatagttaagccttttaagcctctaamacagtatagtctgctctgactttccaaagcaatagtctttttggcacaagggaagaaggtgaaaacctgagtaggtatgttttgcctgcgtagcatttggtgcctggatttagaactttcagtasgcaaaaatgtattacttttctaaaaaccctggtttgtcatttcatcacatgtcaaaacaattgctt

SEQ ID NO: 1403 - DNA, 491 bp, Homo sapiens
  misc_feature 22, 23, 24, 25, 26, 27, 28, 29, 30, 31, 32, 33, 34: n = A,T,C or G
acgacagaagggagacaagagnnnnnnnnnnnnnaaactaatctcaaacttctggcttcaagcaatcctcttgcctcagcctcccaaatttctgggattatatagggataagccatcatgctttaggttttttcattcacagctgtgggctcgttagcaacagtggcaactgtgctttcctgtgttaaatttattatagccctgggattttagaatacgccctgtttggggaaatacttttggatgtccttgaatgtctgaaccatggagaatccttgtcagaaaaaaaaaacaaacaactttgtacctgacttttcgtggggtaaaggtttcagagtcttttaacgccttttagagagtagcttcttacttgatataattatgtctttacccccaaagtctggttttcagagtagataggtaaataaaccttaatgaaattaattattggctgggcgcggtggctcacgcctgtaatcccagcactttgg

SEQ ID NO: 1404 - DNA, 1070 bp, Homo sapiens
agggatcatcaacatccaactcaaaaactttttcatcatcctacgactgaaactatgtactcattaaatgacagttctccattctcctccctctcgcccctggtaaccacaattctcctttctgtctccatgaatttgactattctaggtacttcttataagaggaatcatgcaatatttttccttttgtgtctggattatttcatttagcataatgtcttcagagttcatccaggttgtagcatgtgtcacaacttcattcttatttaaggctgaattgtatgtaccacattttgtttatctattcatctatctataagcacttgggttgcttggcaagttatttttaaaaagaatttaaagtactgtgtgagccaaacaaaacatttatcagctggctggatttagcacatgggctgctatttgatgtcaactgctctatatggaaaataaaattatacgkggatattattatgaactcattgctataggtcatagaaactttggaaatgcggaggataaagtaaccccgtggaaatcacaataaaatgacagacctctttctatttaaaggcttgactaattagaaagttacggagcattatcagagactttactgaacaccctgaactggtatttaatagtcaacatggctcaagccctaaaggaaacttggcagcaatccttctcctttgggagccaacatacagcaccctgcacaaggttttgcccagagcaggcgctaaacaggtgtagaacgaatgaatacgttttaaacttgagtgtgcagtccctattatccagtacactgctatagaaatgaaatctattggcaaatcagccaacctgagcagagcatgagtataatcaagtgagagctccttgctcatacgcagtgactccccgactcactgtttcaccaagttgacactattatgtgccctgatttgatgatggttaaggttttacctgatcaactataacaaggaatcacctatattgcctgcatggatataacaagggctttctagctcctgtgcacaaccaaaaaaaaaaaaaaaaaaaaaaaa

SEQ ID NO: 1405 - DNA, 323 bp, Homo sapiens; identical to SEQ ID NO: 1236

SEQ ID NO: 1406 - DNA, 582 bp, Homo sapiens
  misc_feature 301, 447, 524: n = A,T,C or G
gggtacttggcctttcccacccataattctgggaaaaccctctctctgggagttaatcatcctgcagggagtttctgctcctaagctctctgctgccctctgctgggaggcagasaccttttcccttgctgcaccatggagctctagttctttgagtagcaagcacctgccaagatactccacccttcccacattcattctttcctttcccattcagcaaatacttattgaggatatcctgtataccaagaactacaggccctgggatacaaggtgaataaacttggctcctatctcttangacctcactaaggcgaaagacagaagggttaataacaattagaatatggcttgagaaaggccagacgagagaaagcagaagataaagggagactaggagaaaagaaacgttagcaatgctcacaggagagaggaagccttcactanggttttggcagctgagctgagttttaagggatgggcaggagtaggcaaattgctggagtcttggatttatagactangagggatggaaaggatactggaaattacattttggttgacttaataatgaaccatcca

SEQ ID NO: 1407 - DNA, 575 bp, Homo sapiens
aaagaatgtttctgaaggagcctgagaaatctcttccccttctagagacgcttgctctgccgggagctagaaaggaacggatctccatgctctggacctcattagcgaaccttaccttggaggcagctgagagccctcccgaggggtcctgatcctgggcaccagctcgctctgtgatctacctaagcccttcaatcccccgactctgcaatgtgaaatccaaatgctcccggtgtccttgtagctctgtcaccctggattcttgtggcaaagagagatggatctcagtgggaggctggttttggatggagggccacagggactcatggtcttggtggtggttacagatttcttgagaaatgtcattctttggccgggcacagtggctcacgcctgtaatccagcactctgggaggctgaggcaggaagatcacttaagggcaggagtgcgagaccagcctgcataacatagggaaacccggtttctatgaaaaattaaaaaattagctgggtgtggtggtgcgcacctgtagttccagctacttggaggctgacgtgggaagatcacgtgagcc

SEQ ID NO: 1408 - DNA, 606 bp, Homo sapiens
gattccttgtcacctagtgataaccgttgcakgtatctctctaagaaccccgatgatacagcccatatttgtcttgaggaaagcctttacatatgttttcaattcaagttatttgtagctaatatgtaatctgtaacatattaacaatttataaagatatcctaaatcaatttgtttgtcttgagyttctggactctcaggaggcaaaccgtgtttccatttccagtagagattactattgcttatgtacatccagttttccaacagtcatgtcctcatargaagattccacttcctttgtasttaggtggggtttcattactacttctagcaaattacatgtrccagaagtcatttatgtgtcacttgctgccaagacatttagaaacaaacgtgcctcttctatgtttccaactgccctgcctttgatagctcggaaggcatgtgtaaagaakgcagcacaccacaagatagawgaagggtgcctgggtctctgaatcactgcatggagtcaagactctactgacatgtctttctgtgtgccagaaataaactcttatatttttatttttttctgtttcaaggtgctaagcttgccacactctt

SEQ ID NO: 1409 - DNA, 567 bp, Homo sapiens
ggggcaacctgwtggggtcccttttcaagctgtggaacctttgttctttctctgtttgcaataaatcttgccactgctcactctttgggtccacactgcttttatgagctgtaacactcaccgcgaargtccgcagcttcactcctgaagccagcgagaccacgagcctactgggaggaacgaacaactcccgacgcgccgccttaagagctgtaacactcaccgcgaaggtctrcagcttcactcctgagccagcgagaccacgaacccaccagaaggaaaaaactccgaacacatctgaacatcagaagcaacaaactccggacacgccgcctttaagaactgtaacactcactgcgagggtccgcggcttcattcttgaagtgagtgagaccaagaacccaccagttctggacacaatttcaagtcctcaggtgccatcaatattctgaaaatggcagtgatttttattcaacctgtataaggcactttcaccatgtacctggaagcaacatctacatctttttcagcatatcyaratgytkgskrywsawgrkyswyywtatg

SEQ ID NO: 1410 - DNA, 914 bp, Homo sapiens
  misc_feature 790: n = A,T,C or G
gggcacacgtatacctatgtaacaaacctgcacakgtatcccakaacttaaactaaactaaaattttttttaagtgaattttagccactakattttayagttgaagcatgccatggtacttgtgattaggcatctacctgtgtatttattcacctgaacacctggatgtgtagaataaaaattgctcaattgttgaaggctgctgcatcgctctatgctacttgttctgttaaagtatgttcagggagccagcccakagaggcacctccttttagctctgtgaggccttaaagctgggtcaccatgaagtccctgtatatatattttttgttttaataactccaagtaaccaaatgaaaacaattatttataaaatgtattaagaagtaaatgttatcaatttgggactttgcacaactattattaatgtgacctcaggtcccatgacaaattagaatggcaatcctgggtgagaagttaattttgtcctgaagctggcagaatcaacatgcaccccagttgtgggataggcctgttctctcactccatcacatccaacacctggcaaggacagcttttggtatgctaaagaatttgggaaagatgctgttggtgtaggggcggggagactagaaacaagatctttccatgggcagagctcttcagagcttgataacaaagtttggtctgcagcctttgtcaaataattataaactctccagttgaaacagggaaatgtgggctggcgtggtggctcacacctgtaattccagcactctgggaggctgangcaggtggatcacttgaggtcaggagttcgagaccagcctggccaatatagtgaaaccccatctctactaaaaatacgaaaattagctgggtgtggtgatatgcacctatagtcccagctactc

SEQ ID NO: 1411 - DNA, 608 bp, Homo sapiens
cggctgcgagaagagacagaggggagcssgggcagaagggcggttgctgcagctttggccgaggttcgggctcgaacttggaaaatgctcctggcgcctcagggaaggtccttctcaaagaaaaggatggggctgaatcgctggaaacggttcacaaggaagccgagtcccaaggtgatcccaatcgagagctttggagggcggggactttcccaaggcgcggcgcagtcaggaagccagtcgcggcccgtctgtgcttcctgcctcttcatcctgagctgacacgcccctgccttgaccgccccaaagccagcattaccctgagtgaaatgctctaggagctctggggtctgggcacattacggctttggtgggcagcatcgtggaagaactgtttgtaacgcttttctaaaaccggaggtgtctgctaatgcccatcggggtgaaaggagtttgcaaactccgttccccctaccttaaattttargaaacttctcgcacatttctttctttttctctctcttttttttttttgcaaatcttggggtaattgatctttattaacgggagagagcttcacattaaataccctgcctatattcctgccc

SEQ ID NO: 1412 - DNA, 394 bp, Homo sapiens; identical to SEQ ID NO: 692

SEQ ID NO: 1413 - DNA, 633 bp, Homo sapiens
agggactacatcaggtagggtatgggaatatttaggactactttggtaattatctgaaaagtctagagtattaagccactggtggttttgtgaggcacgagtgagttgaacagtttggtgggctttggtgtatctttgctccaraattatatcaccagttagctgttaggtgctgccatttggtaacgtgccaacttttcaaaaatggtttgccccaaactagatttttctatcttctccaaagccagagccaccttcctgtcctartgcatttttagcagtgccccgtcatcttactggcattcacctgggcttcctgtgctcaatcaggggtcaagtctggcctgatctcagttccacagttcctctactctgtaagttcgagcacaattagcaagccttcgcacctscatyttccttacttagcaactacatcaaacacccgagagtttatcatctctcttcatcctcaccctcctttttagtttttatgtatatgttacacattcatacacacaaacatacctgcatatatacatgtgttttatacgtcccacacaactgtgagctgcttacatacaagacagtcttttacatcattacgcatcactagatgtttaatgttgagtaatg

SEQ ID NO: 1414 - DNA, 609 bp, Homo sapiens
gagaaccagcagacggaaacatattcacatgtgtgtgaatgggtgagattatataaggagagcttgctgagcaaaacgagagagggtcatgcagaggactctgggacactccaacatttaaagggcacactcgggaaaagagccatttaagaacagtttcaaaaggagagatagccacaagaggtcaagctgagatgagcaggaatacgaagccattggaacagagtgagaccctgtctcaaacaaacaaaaacaacaacaaaactttttcaaaagaatttgttgtaagatttttaaaaataccaagcacttttcagtatgtgtgtgtgtagcgggggtaaatatatacataacataaactttaccatttaatcattcttgagtggtttttttggcattaagtacattcacattgttgtgcaaccattaccaccatacatctccagaaccttttcactttccatgattgaaactctggctgggcgtggtggctcacgcctgtaatcccagcactttgggaggccaaggcaggcagatcacgargtcrggagttcaagaccaccctgaccaacatggtgaaaccctgtctctactaaaaatataaaaatt

SEQ ID NO: 1415 - DNA, 616 bp, Homo sapiens
ggatgctaaagtagcgcataaattaacattcagtcctcccaacaatcctggatcttgatactgttatatccctgttttataaaggagacactaaggctcasagaggcagatgactttcccaaggtcacacagccaagaagggatagagtcaggtttcatctagctccaaaagcagagatctttyccctcaaccccactgcctctcttggtgctgaaagaaatggaaaagggtctatgtgaattcagggtcagggcagagtagcaaagtgtgaaaaagtgaggcagattccgacagctcccattactctgaagttgctctggaataacaaggagctggcactgagagcagarcacgtggtggtgctgcaggggattcaatgaaaaagaagcagargctgggagaggakgcttaygcctgtaatcccaacactttgggaggctgaggcaggcagatcacttgagctcaggagttcgagaccagcctgggcaacatggcaaaactatgtctctacaaaaaatcaaaaattagctgggcgtggtggcgcacatgtgtaatcccagctactcaggaggctgaggtgggaggattggttaagcctgggaggttccctctgtc

SEQ ID NO: 1416 - DNA, 580 bp, Homo sapiens; identical to SEQ ID NO: 431

SEQ ID NO: 1417 - DNA, 511 bp, Homo sapiens
ggaagtgattggatcatgggagtggatttcccccttgctattcttgtgatagtgagttctcacgagatgttgtttaaaagtgtgcagcacttcccccttcagtctcttcctcctgctcctgttatgtaagacagcgtgctggcttcccctccttctgccatgattgtaagtttcctgaggcatccccaaacatgcttcctatacagcctgtggaactgtgagtcaattaagcctcttttcttcacaaattacccagtctcaggtgtgtcttcatagcagtgtgagaacagactaatacagacatgatctctagtgagagtgtgagaggccacagaaggcaataagtgatagcagtgatggttttcagtagcatgatgatagaagctgattaaggaagattcccagctacctcagtacacagtgccttgttgagttaaagaaatggggccaccaggcatggtggctcatgcctgtaatcccagcactttgggaggccgaggtgggcggatca

SEQ ID NO: 1418 - DNA, 580 bp, Homo sapiens
  misc_feature 156: n = A,T,C or G
gctgggcacggtggctcatgcctctaataacagcattttgggaarssraggctaggagtttgggaccagcctgggcaacatagtgagacctcatctctaaaaatgtttaaaaagtagctgggcgtggtggtgggtgcccatagtcctagctactanggaggctgagatgggaggatcccttgagcccaakawcttgaggctgcagtgagttataattgcaaaactgcactgcagcctgagtgacagaacaagactccaactcacacacacacaacaaagtttttgctaaacagaagakakattttggggatatctggcaataaaaggagaaaatactccaggggagatggatatgggaaggacagagtgggacacctaagagaagccccacatgattttcccaatattgcctgggcagccctaggagctgagggatgggacaaggagataccagcagcctgcagaaagctgcagagctgaacttgcacacacaccatccacggacacctgaatgcagcccatgtttatgccatagcatgtgctctctcttataagcctcatgcacccgctatgttccttt

SEQ ID NO: 1419 - DNA, 578 bp, Homo sapiens
ttttgggaattcatacgtcagttccactactagttccaataacaaactcattaaagttcaaatgttttgcaattctttttgtccttagaatacgttccagtgagtatagacagttaagatactctgtaaactggaattaaaaactgagattactttttattaatatcayataaagtttatttccatttgtattcagttttagggctctccccatctttattgatttaatttttgaatgtgaaaaacagtaacatttttttccatttcacaggaaaataatttagtgctcattacagctcatgatgtgctgttttattaaggtttgagtttatgctgttactatcaatgggggtcttttgtttgctatagcattataataatcattatcatttgaaaatgttggctgggtgctgcggttcacacctataatcccagcatttggggaggccaaggtggggagattgcttgagcccgggagttttgagaccagtctgggcagcataatgagaccctgtcttaacaaaaaaatttttaaaaattagttgkgggcatggtggcacatgcccgtagtcagtctt

SEQ ID NO: 1420 - DNA, 884 bp, Homo sapiens
gtctggggatgcgaccaggaccctggggaaagacatgaagtggtcaacattaacctgagaaacaagcctgaatggtactatacaaagcacccttttggccacattcctgtcctggagaccagccaatgtcaactgatctatgaatctgttattgcttgtgagtacctggatgatgcttatccaggaaggaagctgtttccatatgacccttatgaacgagctcgccaaaagatgttatkggwgyymtytkrtwaggtcccacatttgaccaaggagtgcctggtagcgttgagatgtgggagagaatgcactgatctgaaggcagccctgcgtcaggaattcagcaacctggaagaggtacaaaaaggggtccctctcctggtcagctacagtggaggaagctaggcagggtcgctaacctggtcactctgacaccagctttcacaggcttattctttctgcctttgataagtcagacttctgatcatctgattgcatgtttgccctcctctaacctggtctagaattattctggaaaatctgatgaggagttggggaggacatgccatgaattgcttcctttcccagagtcaccccatcyccctgagtagctctgcatggcttctgtagcttctgccaatgaggtcaaggtctgtaaaggttaggggttgtgtttggctgctgaagtctaactactgtaaattcatgttgtaagggtttactctctcacataacattctttctcacgtattataagggtttattctcacacatacggtggctcacacctgtgatcccagcgcttggggaggctgaagcaggaggatcacttgagcctagaagtttaagaccagcctgggcaacatggcaagacccctcctcta

SEQ ID NO: 1421 - DNA, 798 bp, Homo sapiens
tttggccgagcggcctacggctgcgagaagagacagaagggatcacagtgctgggtacataatygayrstmarkrtatacataagcattcaagttgttaccttgttagtgacacataacattttatgatttatttatttctagtttagataacggaacaaatctgtttgagtatggtactatataccctgatagacagtacctctctcagggtagatacaaattgcaaattagagttgggaaaaagtggcccaagcaagtggcacaaaaagtcacttgcagataaaaagctttctgtgagtatgttacagtgaaactttcaatgaagatatgtccaaatgcagttaatcagaaaccagccaaactagcctaaacatttatggatattacaaacattcttccaaaaattttttttcttctgctcaattttgtgctgttttaaatgattatatgtaattaattttcaaggaacttagttgagccaaatgtgaatcttttgaggttttcctattgctagcaattgcttcattaagaatatgaaataggcacctggtttttttaatgctactgttgagaatacagtgaatgagtcctatttataactgaattaaaagcttaattaagtttatgagtgttttaaaactgtataaagttaatgctaatgtatttattaaaagtaaaaattattaatacatttttcttctttgcaacaaagattaaaatgaaaaatgctttaaaatgattgaatgaatacataatcaattatccattgcttgctgactttctgcctagcattata

SEQ ID NO: 1422 - DNA, 694 bp, Homo sapiens
ttattttccctgttgcaatggtcccaaataaaatctgtttttatctatttagctactgatcagctcttgttttcttggacagttcccctgccccacctggccttttggtttgaaatgttagcttctttcacgactctcagmggcctagckgcykcgakrwsmckrcagargtrscagtagcaactacgcttacattgygaaccccagttctgtgaggactctcctctgttcctctaggctctgaaaaccccatcacttctcttttgttccttaagccctagagggggtggtaattatatccaactttgtaatcaattatttgagtctaattttctttgcttgatataacttgygtggttcttgtttttttccagttggtccctgagcgacccattaactgacttaataacttaatagagaagagaaaactgaagcctgtttagatgaggaaataaacatgaagtgagaagactgaagccacaaaacatcagaaagtgtcagaaactgtaaacatgaggaacctgtgaagatgaggacaggggtgggatgaatagagaaggcctgagagtgtgtcttagaagcagttatattctacatattcttttccttttccatacagaargatgaacgtttttacatggctgtggcaagaaacagaaggttcactttcacaataaccgaagcagcacagtct

SEQ ID NO: 1423 - DNA, 713 bp, Homo sapiens
ttggccgaacggcctacggctgcgagaarwgmcagcwssskcttcctcaagggtagtgtccctggaatgaagccaccagcaacaggagaggaaacagatggggttgtagaaagtaggagcagcaaaagcttctgaacttagtaataagctgcttgccccgggacagaatctcactctgtcacccaggctggagtgcagtggcatgatcttggctcactgcaacctccacctcctgggttcaagcgattctcctgcctcagcctcccgggtagctgggattacagctgcatcgcgagagctcagaagctcagtcaatgcaaaacagaaggcactgagggaaaatttcagatgagaatggacgtaccctctccagaggcaaagaagtttgcaaattactttttgaagccctctctatataattttgaggttaaaaatgctttcctcctgcgaaggagagattttaatctggattgtatgctggagctcaatgattgatccaaatcagagtccagaggcctcatgggaatgatgatcgtcagggctacagtggggcaactgcagatggagcttgcccctctcctccataaatggggaagagcctctcacctccagtgaggttttgtgcataagaaaggggaggcttgttagagacagcagctttgaaaacttaattctccttgccaagaactaatggactatcttcaatgtgcatg

SEQ ID NO: 1424 - DNA, 932 bp, Homo sapiens
ggggctaataggtgttaaggaggcatgctgtcctttggcgttaagacagatcatttcctcagttgggtaatgtttaaggaatccactaaatccttaaatatatggcacacataaggaatgcagagcttttatacactcagccttaacatgggttattttttagcatggctaatggctaaacttgatttctactgggtttgttcaacctatttctaacttataggtaaaagcctgctttttatcctctccatcctcatcacctttttagttgtgtctctgcttgattcttcttgcattcaggtctatattgtattataaaaagaaagagagagacagagagacagagagagaaggaaaagaagaaggaaaaaaaaaccacacacattgaatgggarggcaggagagtagagctctgaccccagctctgtcatagccacctgtgtgactatttgcaagcattttcatccattcaacaaatacacaccaggtaccggagatacaaaactgtgaaagacacggttcttaccctcaccacttacagtcaggagtagagagttaggtacacaaatagaatgtgaaatcacttctcctttctgggtcttcattttacaaatgcaagagccaggactgggccaggtgatcatcaaggtcccttctgaggctaacatgccatcattcatgcaaaattcattaaacatctgataatcacttacctaagtgaaaattagcaaacatttcccctttctccttagtttgtaggggatgatattgaagacgaatgaggcgatgtctacaaaatgctttaataagcaagttggagaaagagattatgtaagtttgaggcattatgattaatgaaaaatgaaaacaagggctgatgttttcagagagggaacagatggttcctttgttcagaatttgagtataaaaaa

SEQ ID NO: 1425 - DNA, 1174 bp, Homo sapiens
  misc_feature 835: n = A,T,C or G
gggtccaacatgggcctcctatctcttcccagtcatcacattgcattgtatttgcctgtttgcttttcaaactctttctttctagataaggaaacaaaagccttgaggaatgaaggaaattgccaaaagaccattaacaataataaatgactaagccctctgttccacagtctgcacttttctttctgcggaatgacccttgtaattgtaagccagggcatttctccacagatggatatcccataaaaacaaagccaaagtgacctgaaaggcacagagaaaatgtatgtctatgtccatttcttccttctcaatggttcctttttattcgtttgaaaataagagtgtgaagatgtgattctaatgactaataacaactaaaacatttattaagtgctgattatttgccagctcttttgctgagggttttatatggatcctctcatgtattcctcataataaacctgtaaggcaaatactatgattatccccatttcacagataaggaaatatctacagaggagtatttgacttgatttgggccccataactaataggcagaggcactggcttttaaactcaatttgacacaattactctttatttgtataagaagtgagattattttcagtattgcaaaaattcactgtcaattaccaaactatttgacwtagataacatatcaattatgtgttgtgagacaaacagcaaacataccttatgttcagaatcctttagaaaacactgagaaatatttagagaataagagagaaatgaatatgcctaaagctctccatgctcatattttgctcctggtttctttggaatgtcctancttgaagagatgataaagggcttgtatgggtccaattctgtgttgtagaaaggcagatgggatcctgaggctctgtaaaactgttcctctgctaggcatacttcatattctctatattaaactcatctttaattggcatggaagattcattgttccaaatctcagatgaagatccctatattggatgcaattaagcctggcagcgccctcaaaagacaaacttgtcactgctagccacagccaggacacagtaacagttccttctagtgacccaagaccaataaaaaaataaaaatactaaagaagttctgacctccaaaggcaattagcccattcctg

SEQ ID NO: 1426 - DNA, 734 bp, Homo sapiens
agaggggttttctgtaaccagtttctgctttgcctgatctagtagctgtccacatattcaggtaatctattcctaagtagctttcaagcagtcagaaacaggattgcattgcttgtacttttttgggcgggtgtaggttatggagaaaggaaattggataaagatcacagagaagaagattatgatggtgccggtgtcactgagagatctactgacccgatgttgccttcttttgctgccttgtgtgtgctgtacgtatcctgcgttaggacccttgctttggcagcgttagctacaaagtagtggaatgtcccatgcagttatttctgtatttctgttaggtctgttcctctcaatctcctcagactgacttccatatcctcgtttctcaagagtgtggtgcccccagaccagcagtatacacatcaccaagagctgattagaaatacagaatctagagctccagcccagacctgctgaacccgggatctgcatttaaacaaggtccccaggggattcatttgcattggagtttggattcactctggagtttgagaagcacttttgttctcttcctacttttctacttctaatgaagtttaaaaagtgcagaaaacaaactataaaaggattaatgtagtaaccctgctgtgtattgactaacccattatacttagtttattgttttacagacttacctgccaacacattagtgggccttgaattaacataat

SEQ ID NO: 1427 - DNA, 637 bp, Homo sapiens
acagaaggggggcaacctgatggggtcccttttcaagctgtggaacctttgttctttctctgtttgcaataaatcttgccactgctcactctttgggtccacactgcttttatgagctgtaacactcaccgcgaakgtccgcagcttcactcctgaagccagcgagaccacgagcctactgggaggaacgaacaactcccgacgcgccgccttaagagctgtaacactcaccgcgaaggtctgcagcttcactcctgagccagcgagaccacgaacccaccagaaggaaaaaactccgaacacatctgaacatcagaagcaacaaactccggacacgccgcctttaagaactgtaacactcactgcgagggtccgcggcttcattcttgaagtgagtgagaccaagaacccaccagttctggacacaatttcaagtcctcagggtgagttttccccagctgagtgagaatataaattagtcacaggagtaccctgaatcactgtttggttggactagtttttctaggtgaacactgtgctggctgtgtggcacaaactcctgattggtcagactgaaatttccttgcggaagaaagaagagtatgtttttattgaatcctattatttcttaactcct

SEQ ID NO: 1428 - DNA, 710 bp, Homo sapiens
acaggaagggcacttcctaactggaggactcagacaattcacttacctttgttgtgcctccattkcsksmtackgytsmkwgwagatgayarwagrsatcatagataatagacatacatcagagagttgtttgtagattaagccagttaatttaagcagactgctggaacagtgtctggtttataataagtgttagctattttatagttttggtttaatttgtaacagagaaatccttggcattatcagttttggagtaagacacaaaatgaacattttaatcattatggaagtaattcatactcattgcctcatgctggaaagcaaatggaaaagagactaaacagcactcaaaacatgatgcccaaggtgactgccatttgtggttgatctatttctctttgtgaattgagatctgcataacaaaaccgtattgtaagtacaagtttgagcctaattattttcacttaacatatatgataagcatttccccataataaaacaattattcataactttaatggctgcataatgtaatcatattgattaatcgtaatgtgtgacacattttcttagtgatgaacatttagtttctttctttctctttgagtagggggtgggggcagctgttacatatggtgctggtggccaacagtcatgcatatatattcatttacatatatattttttcttagtatttccttattctt

SEQ ID NO: 1429 - DNA, 590 bp, Homo sapiens
actgtgtgggaggtaaaggggtaaatgggaactctgtacttaccattcagtttttttttctctaaatctaaaactgttccaaacaacatattttattttaatatggtaaacatgcaaaggcaaaccctatttcctgtacatagtggatgtctgataaatacatggyacatgaatgcatgatgggatgagtgaagaaatgaactgcgtgataatgtatgtgaaagtaccatgtaaacaaactgcctgacaaatgtggggggaaaagctagtgaggaaaaatggaaaacaagtcatgaaaaacattcagtgtaaaagtttgagaaggcataagaggaatttgaactaaagactgaaactattttaaactgtttaattttcagaaaaaaataatatagtttttattaaataaaaagttgatacctatgctttcagagtctgtgaattagagacaccatcttgacaccaattacttctcatattaatttggttttgttctagaggcttcagcttacaagtttcagaggaggtccttctctaaaggagttttttgtttccttcattgtttaatatgggcaggtttccgtaatctc

SEQ ID NO: 1430 - DNA, 758 bp, Homo sapiens
gcggcctacggctgcgagaagagacagagggcttgttcacctatgtaatccgcattgactaggacattgcattgttgcacaaaatgcataattattttttgttaaactaacaaatacataattaaaaatataaataagaatgaacatcccagaataacagagtaagaagctcagcaaattctctctcaagcaaaccagcaataaaactggaaaaattactggaaacaaccatttcaagtggtgaaaaatgatcaaatggcataaagcaaattcaggagcatttattcaagaaaaattagtgattcctaataagaaaagttggagtctatgatatttaagctgggatctgttttcccctccgcttctcagatacagctttgaggtacaaaactttcacactgggtagggcaaggcagaccttaaagactgacaactcccattctttccagacccatgttacacagcatctgttgtgggcaagtagagaatactgctacatccaacagcttccattacctgtggcaccttattgtggaagttctaaacaaggtcatggctggtcataagaacttgcagctcttcaaccctgcccaagagaggctgattttacatgaagcagaatatggaagatcttagatacaaaaaattccccgaaagctaaaatttcagtgatactaacaaaattcacagcaacgtaccccagaggtagagaaaaatcagaatcaagagttgataaaatatattaactaaagcatcta

SEQ ID NO: 1431 - DNA, 845 bp, Homo sapiens
ggcctacggctgcgagagacgacgaggggggggcttgaagaatggattaatcttctgagctgttctcttaagagaatcctgggtgccttcaactttctcaatttctccttcctgctggctagaatgaggacgatggaaagttggacaggaacaagataggttaarcacttacaaatcaactcatcaacaagtcacagaaggcataattttaattctgaaagagaatataaatcctatgagccctggcaatgtccacattgaaatttatgacaatagtttgggaggtggaagcagagaaagagacctgatgggcgtgtgggaaccctactattaaatagcacagagggaagaggaaccgttttaaggtgaaagactacagaataaagttttgagaatattatttaaagtcctgatggtaaccgatagaaaacctagaaataagattgtatctgactaaatatgggacaagtcaggaggagtgtagagtaatattgtgtgactgagcacaatccccacgtttggtagcccctgagatggactcccgtgatccctgacccgagctattgtaacactttgtaatcccatccgtttgaccatagaccagacttactgacttctaacarataggatacaacagaagtgttgagatgtcacttcccagattagtttacacagaaactttggctttatctgaggcacccactctattgctctccggattgctccaagggaagacagctgccatttgatgagctgcccacatgacagagaacaggccaatagccctcaaagaattgaaacctaccaaccaggggagtgagattggaagcatatattccttcgat

SEQ ID NO: 1432 - DNA, 636 bp, Homo sapiens
gaatggtcacgtggccgggatggggctgtgttcctggcagtcccctgggctgcagggacctggattcttagtatttcaggctgctgtcccttttttttttcatttcctttttgtttttgttgttgatgtgaccgcgtgtccacaaccctgggattccctcgccctcagattccaaaatccaatttcttggatttcagtgtttttaaggtgggaggtctcgctatgcttcccaggctggactcaaattcctgggctcaagtgattcccccgcctcagcctcctgagtagctgggactacagatatggcatgtcagtctggtggtctagccagaggaagactcctggagctggtgaactgtgcatggatatgcagtcacgggcagcccacctcctactcctcaccctccctgtgcctgtgagggtctgcactcaccctggtcttgctttattgcccaggctggaktacwgtggcgcaatcacggctcactgcagcctcaacctcttgggcccgascaatcttcccaccttggtctcctaaagtgctgggataacaggcatgagccaccacatctggctgaggccccacattttcattttgtgctgagacttgtaaattaggtagctggtcctggctgt

SEQ ID NO: 1433 - DNA, 835 bp, Homo sapiens
aacataggggttgcttccagtttagggctattaagaattattctgctataaacattcttgtagatcatttcaatgagcatatggatacatttcttttggataaatacctaggaatgtgataggtgagactatgtttagctttagtagagattktcaaacagttttctacaaggtttgtaccaatatgcactctcagcagtagcatgtaagagttctgattgctccacatcttccccaacattttatattgcctgtctttttcatcttagccatcctggtgaatatgtagtagtgtctcaatgggattttaatctgcataccttttatgaataagaagatggacagttttatatatttgctgggtatatgggtgtcctattttgtgacatacctctgtgtaataaatgtttcatttaaagagcagttgcatgtccattttgtatatgtgtccccaacctcagcagtcattgtccttttaacctgttttcaatttactcctacagtcattatcataatagtagccagtggcctattaattctcagctattacagtcatatttttttcattactatgtattgtggagctttatactgttacaattattacttatattattagtgatatctttttattcaaaatactattcttgactcatttttattataatcatcatccattacgtcataggcttcatagcaatcaacattgcatccctgtacctgctaagaatattttcagctacgagtatcagaaaactagcctagaggatcttaaacaaatagggtttttcacatgtaacaagaagtttctggtttgcgtcagctgctccatatc

SEQ ID NO: 1434 - DNA, 596 bp, Homo sapiens
ggggacaattgaaactggaatttaggtggtaaaaacagcactttgggagaccaaggcagtggattgttcaggagttcaccatcctgggtgacatggtgagacatcgtctctacaaaaaatataaaaattagccgggcgtggtggcgtgagcctgtggtcccaactactctctggagcctgaggtgagaagatcacttaagcctggtaggtcaaggctgctctctatcctgggtgacagagtgagagcctgtctcaaaaaaaaaacacgaaacaaaccccagcactacttggcaggaaagcttgtgattggcaaaaaaraaaagggaacgctctcacagctggcgaggacttggctcctgcctatagtccactttcaaagcaaaagtaaagccaccaggatgggcgttggtgtttccctctacagtgtgggtaacagggcaggccctgcgctcagtacccacattcccggctccactggacttccagctctgtgatcactggacacacttccagctgtgtgatcttggacaagttattctacctctctgggcattttttcatctataaaatggggaggcctgtggacagattccttg

SEQ ID NO: 1435 - DNA, 681 bp, Homo sapiens
gctgcgagaagagacagagggggtagggcagactgtgcagtcccacgtaatttctctcatatctttgggccagtcctctttacccttgacatttcccttttttaggacttgaaacagtctcacttttcttaatgcccctacccagagataatcactctcttttatttagggaaatcaatatgtacacatttacagttttaaaaaataatatttgtgaccatggtgtatacggaactttgaccctggctgcttctgctcatttaacatcccattctaggcattttctgaagtctttgacaattatttgcaagcatgttgttaatggctgtacaatgttccattgaattgtaggtaacaacaacacaagtacagctggcccttgaacaacacgggattgaactttgtgggccagttttatacagatttttttcaataaatacattggaaaattttattggaaatttgcaacaatttgaaaaaactgacagatgaaatgcataacctagaaatattgaaaaaaattcagaaaaagttagatatgtcctgaatgcattaaatatacgtacatactagtctattttaccatttacaaccatgaaatacacacaaatctattataagaagttaaaatctatcaaaacttacacaaacccagactgtatgtggtgtcattctctgtca

SEQ ID NO: 1436 - DNA, 921 bp, Homo sapiens
  misc_feature 586: n = A,T,C or G
ggtgataaatttgctatgatttgaaccccccagcctctgggcctggatttgatgatcacaattataaaaatataacctactgtgccactttacacttggggtgattgattttggtgcttatcgctaaactagctcaaagggttgtcttcatccaacataattactattcctgtaattactgaatctataaatttcatgcctcttttgtttcaaacagaaaaatgggcttgggaaataagaaaaacgaagaaatccttagtcaaaataatatacaccaggtgttctttgtctcggcttgatttaattagtcttgctcatctaatacgtcatgcttgwcwswmsgkatcactgaattttcagcttggttacacacacacacacacacacacacacaaacctcacaagaacctggtattcagaataaaaagagctacagataaaaactttttgaagcttgagtytgcgtctctctgaaggtgagctgccttcagttaattgctgttttgttgctccctatgktgattacttttatctggagccctaaagacctatggggacctctgggggtgacaacaccatgactgancagtgcatggagaggccgacaaatgtcagcatcagaaacctccatgtgaggataatgaattcaggcgtttcaaaaatcaaccagcttcagagaatggcatttgagtgtagtcatgcttatttttgaaatgtaagagcttgaggctcccctactgaaataaagagttttcaaacaaaggcctggaagagctggattggcagctgctttcatatctaaaaaatggtgctgctgttcaacctgatccaaggtgaaatctaaagatgagggcaaagaagagagatgctcaagggtagttaaattcacagaagcttaccaaaaaaaaaaaaaaaaaaaaa

SEQ ID NO: 1437 - DNA, 732 bp, Homo sapiens
gatttagtttcataactcatgatttttcaaaaacttctggtttgaagacaccgattgccgaaagtccattgtgctgcataattacacttggtccacgtgacagcactaacatgttctgaaatgtttttagaagtagtctcagcaaagatgaaggattcctccctgtttgaaaagaaaatattctttgttttttctttgatctaagctctaagactagcagctagcatctgaaacttttttgacgagagtgacaaaccaactctaatattaaaggcaattgatgattrkgggcaytgaagggaaggtaaccccaggctggtgccccggaatagggatgggtcacaatgttgaggacatttcgcctgttgcagaacccacctgcaacacagtgtggcccttgccatgtgacttgtgtgtgtgcctgtgtgtctgtgtgtgcgtgttttaattttgacttcataagtactctagttatgagcttatttaacattgggttttactaataggggtatgtgttgagaaaatttcaaagttttagaatatggttcacccacatgttgcttccctgtaaatataatttttaaaaccagattctgggccgggcatggtggctcacctctataatcccaaaacgttgggaggccgaggcaggcgaatcatgaagccaggagtttgagaccaggctgaccaacacggtgaaacccagtctctactaaaaatacaaaaaaaatt

SEQ ID NO: 1438 - DNA, 600 bp, Homo sapiens
tacggctccttcctgttggccactacatacgtgtcccccgcttcttgcccctctctgcttgggtccctgctacactggtatcctgcactttccaccttgtattgccagtttgtttccaaggccatctccactttgagcttgttcatgaccacctcacacagcacacttggtctgtgtggtggtttgaggggttctgtctgtacactgtgctttggctgtgttggaggcgggcaggtgggaaggaagaaatgtattcttggggagatttgtttttagagacatgagacatggaaaatagttaagtaataatataatatgggaggcatggactatcagaggaggcaggcaggactgcccaacctcctcactgggcacgttacgctacttcctcctgacctctatagtcctttgcatttatcaagcactgtcatacgtgttatctcatgcaatgaccagggtgtcaccccctgttttgtaagtgacaaaactgtcactcagagggatgaaatgacatgctaaaggtcatctagttagtaatggtggaatcagggctggagcccagtcttctaagcctaattcctattctgctcttcatcatct

SEQ ID NO: 1439 - DNA, 761 bp, Homo sapiens
gagtcaacaagtaccgtaagggaaagttgaaaagaactttgaagagagagttcaagatgagattagggtggggacacagcccaaacatgtcaggtaacttcagtggaatgatgactgcataagtcatactgtactgaatggaagaaagakttggmmsagygrmcwwmkkctrckwkwwsagasagakkkctcttttgaagggtatgggaaaaagatggcacaaaattcatttgaggatagcatagatctaaaggcatttaaaaccttgagtcttgaacatatttataggcacggaaaaaattctacagaaaggaaagattgtaattataggagagagaaaaacagtgatatttctgaggatattgtggggagtgggtgctaaaggaccattggatatatcattcttaaacagaagggaaagatgggtacgtgaaacagaggggcaaggtaattggtagttggcagaggagtggttgaatttaaggatttagggtgaagggagaaaaagccccaggagtgccaagaagattaataaatgcttttgttattcttttctgaattcttttctggtgagaaactggaagaagtcaaggacaggaggatttcaggcagttgaacaggaggactgggagagaagtaatgagaggggtgaggagaggcattgtggacctttgagttcataatgtcagcatcagagcagttctaagcagtgatgaagtgcttttcagagtgtgatcttgattcttcctggatggaagtga

SEQ ID NO: 1440 - DNA, 530 bp, Homo sapiens
gcggcctacggctgcgagagacgacgaggggctgccttatcsmrggtatccccakaacctgaacctcggctgagactgggaaggacgtggtgcctgggggaggtctgttaaacarcagaaagagtgacctttggtgagtgtctggcacaattttctacactgcctggctccagattcaccaccgtggcagagccaactcctcagtgtaagccccaaggcccccgcacttggctcaccacctggcgagtggcagcgccatggtgacctcagagtcttcccatgatgaatggttcccactcagtcaaaggcacttacaacctgcctcaaacacatgaacactgattgaatccttgttttaaaaaattaggataggccaggcacgatggctcatgcctgtaatcccagcactttgggaggcttgagttcaggagttcgagaccagcctgggcaacatggtgaaactccgtctctaccaaaaatataaaaaattagctgggcgttgtggcatgcgcctgtagttccaactactc

SEQ ID NO: 1441 - DNA, 802 bp, Homo sapiens
cggcctacggttgcgagaagagacagagggggraaggggcgaggcaaggccctcctgaatacctcaacccaaatcttcaagaaatccccaagtcctcacagtgctttttgtggatttttgtggaaaccggtaaaaggggctgatttgctgaccccagtgggtagaaaayagagactgtcaagagaacagaagagaaggcagaaaggggatggggaagtggggttcgccatgttcacgagctcctggagccacagggccccccaggaacaacagagctgagactgggtggccttgtttctggcccaattccctgggaccaccaccctggaaggacacttgagccctactcaaggacccaccacaacatctcagcattgtcggtccttaaatgccaaggtctgtgctcaccatttccatccttaagattctcacagggaagaacccacacaacagctttgtccctgcgactctgggtgagtttctgacactggcctgggctcccgttttgcccgtcaccaacttctcacagtataactatccaagagaagtagcatttgatgtcagggaatcaaaagggctaaggctcgggaggccaaggcaggtgaatcacttgtaatcaggagttcgagaccaccctgaccaacatagtgaaaccccatctctactaacaatacaaaaaattaaccaggtgtggtggcaggtgcctgtaatcccagctactcaggaggctgaggtaggaggatcacttgaacccaggaggcagaggttgtggtacgccaagatcatgacactgcactccagc

SEQ ID NO: 1442 - DNA, 915 bp, Homo sapiens
acgtggctgtaacccctgaaaagtatcatccccatttcacagatgaggaaactgaggctataagaggtgaaggaactttgaagatactagctaataacagctacagtctggttcagaatccaggagagaggtttggagtttgtgttgggaaggggagcgtggggaacaggtatactcacccctctggcatgagggcaggtcctcactccaagttargtcccactggcacatgargacactggatcccactacctggtagccagggtagcactggtaagtgaccacggygccgtgcactakctcakgctgcgatgggctcttccagccattggggatctcaggcagctccggacatgtgtcattgcggggcacctctgggggcacagaggcacaagatgcaggccctcggccagcaccaaagtgactgtccccctcaccttgagggcactctggctcctgctagtttgtcctggacctasactgtcctgggcgggctcagggatccattcctccctgctcaagggcccctccttgactgcctgacattgctctgtctcctatattccagggttagcatttaagctttggccttacttccaaaagcaccttgaccagttccttatgcctgagagatggggccaggtagggtgagggaaatcgtcacttctatgaaagattgtcagaaagatagaagccagcacctttccttagttcccccatttttgtttgaaagttgttctggccaggtgcagtggctcacacctgtaatgccagcactttgggaggctgaggtgggcagatcacttgaagccaggagttcgagaccagccaggccaacatggcaaaatccggtctccactaaaaataaaaaaattagccaggcgtggtggcatgtgcctataatcccagctactc

SEQ ID NO: 1443 - DNA, 532 bp, Homo sapiens
acgacagaagggggtctcacaactgaggggcctcggcggaggacacaagtcagacagagccacagactaaccgtacgaggtggctttttctctccagtccaggtcccctgaatgcgccagagcagacaagcttggacgtgaggaggcaagaggcagcgagaacaggcgcggagacggggctgggggagaagaggaagaaaccctgtgcttgtgcccttcccacgctcgcctgtcaccgggttagctgactggggaagtgttctctgagggtgcaattccttgcccttcccgtaagtcagctcccggggcgctgggtgagggtgcagccctgtccaccacggcgagccagcacactgaatcacggcagaagctgcttcctgtgtgggtgcagcctccctccctgcccaggactcagaagtcacgacagcatagagctttttaatcgtggctggtgccccttcaggaatctcctgaragccacagagaaactccagagtggctgggcacggtggctcatgcctgtgatcccagc

SEQ ID NO: 1444 - DNA, 634 bp, Homo sapiens
cgacagaagggtacatatttgcatataggattaaaagaatgacttccgtaaaacgtctagcacagagctacagagtgtatttttaatacattacagttcttgagtaaagatgattatttgataacactaagtgatatgaagccaagaaatgtagtagtgttcgaatcctttccacctcccttactcttgggttctgactttagaaactaagtaattccaggacataagtgaaaacacatttcaactgccctctattatacttacttggtaaattagcctgcgcattatttttaaaataaattttgttctattgctaaaatgccttctctagaaagtttctgtctgttgaattcattatttaaaattgaatcttactgctttgggtaaatatcagtatgtttactatatatttgcattgtgctggcattaggtaagcattcatacagtgttccttcttatgaagagtgacatattttataagagtggaaaaccatggaaatgaattctcatagtttaataaaatatatccagtgtctgtcttgcaaaatattgtaataccatatagttaataatataataattaatattcttaaacrtttccaaaagaccaagtatactatgaaaaaattttttt

SEQ ID NO: 1445 - DNA, 611 bp, Homo sapiens; identical to SEQ ID NO: 277

SEQ ID NO: 1446 - DNA, 829 bp, Homo sapiens
atcaaattaggtaaatagcagcatctttaagagatctcaacaagatagtgagaaggtactctaaaattctgggagtcatgcacatgctctccagagtctaatttarcaatatgtcaatgaattataaaaaggtgcatgctttttaacttttattgaaataaaacagtttaaaactttttattgaaacatatgtctggaaaagggctcaatgtataagcacaaactasatgagtgtagggcccagaattgagtgacagcacccagatgaagatgagttattatttccagtacctcagagtcctccccatgggctccccagaaactgctgttccccgagagtcaccacaccgctgactgccataaacttagactggctttgcctgtttttgtacttcatatgaaaggaatattaatgtatgctccattttgtgtctggctgtttttgttcaatataatctttgagattcacctcgtactttatggggatgaggagatcatgtgtttacacagcagaatcatattacattatgtgccaagggctttgatggtgtgctcacagggatgcataccaatctgtatgctcttcaatgtgtgagcaatttggagggatgatgcacagtagataccaaaaaaattcacagatataagctgtaacaggtattatgtgttaagaagcactccagaaaaaaatccaatatttctttatctatagatatatacattgagaaacatgtatatatctacagataaacatccaaggtgttaaacaaaatcacttttactaatttatacagtaattccagtaattctttggcagtagtttttttga

SEQ ID NO: 1447 - DNA, 435 bp, Homo sapiens; identical to SEQ ID NO: 175

SEQ ID NO: 1448 - DNA, 931 bp, Homo sapiens
ttgcagcaagccgagatcgtgccactgcactccagcctgggccacagagcgagactacgtttcaaaacaaaacaaaacaaaaacaacaacaacaacaaaaagaactgttaatcagggcaaaaagagggcattgaggcatggaaggaactgcagaaggatgctaccccactagggttaagggactaaaaggatgagattagaattactaacatttagaaacttggaggaagggccctgcagaattggaattaatacctttgagcagagtctgctggcctgttggtactagtgtttctgagggatgcaacgaggttggttatgcaagttttggaacaactgcaaatcgaaataactgctgctaccaggatgaattccactaccaagacaggcattaaacatcattcctaaggcactcacccactctcagaactcaatagactgaatcttcaacttgcaacaatggctttgtttttgacatgtgtcaatttcccttttgctttccagctcagctatatattttaagtgtgtctatgtatttgcagcagatagaagtgattcctttcaccagcttartcatttgtcaagagtttctgtgcacttgtcttcatycctgtagggcattaccctaacccaaaacattatcatttcttccccagactaccagtaccatcttctaacttgtctacctgccttcattctaacatgtccaccatcttttctccaccctgcagcaaatgttttgtaaacaccaatctaagaacattatctcttggatgggcatggtggctcacacctgtaatcccagcactttgggaggccaaggtaggtggatcacctgaggtcaggtgttcaagacagcctggccaacatgatgaaatcctgtctctactaaaaacacagaaattagctgggtatggtggcatgtgcctgt

SEQ ID NO: 1449 - DNA, 511 bp, Homo sapiens
gcggcctacggctgcgagaagagacagawgtkkggagtataatggttattgtgattgattccctgacacccagtcyaccccactatggtcatttcagttgactcccttatgtcaagtccctcctcctaagccactcatggcattcctgtgctccttgctggttatttattagttaaggattggrccattggtttggtcatggctaatgttgagggagcttctatgaaggatttccttgcttctaagaaagacacggagagaaggttgcctttcttcctttggtcattgctgwgtctggttgtgatgcctggaattgctgcagttattttgctacccgcctgagaatgaaattagtatgttctgagctacaggattatctaattctgggtccttctcactttgggctttttatggcatgagatatatatcctcgttgtttgagacaggtttatttgttttgtttacagctgaaagcatcctaactggtaaagatgtattaattcccttcctg

SEQ ID NO: 1450 - DNA, 798 bp, Homo sapiens
atgtgattctgcatcctggtctcttcagagggttcattttgacatatctccagactcatcaactagatgatgtgacggtcctcttctccctgaaacctatccatagtggagattgtgaaatacagcctggcacagcacctacatgatggtgctctcttctcatgcctgggtgctgcccacaggggtcattgtgacatagctgggtacagtcttcaggtgatgtaactctcstctattttggggtgcacacacacagggacattaccatatagctctgctcctcagacctaggtgatgtgactctcctgtctgttacctcctcttagggggtattgtgatatattgctgggcccakaaccgaggtgatgtggccttttctcttgcctgggccctgcatacatggtgtacagtaacatatatctgggttgaacacataggtgatgtgactcttctgcataggtcttgccaacaggggtattatgacatacctttctattcgttgcctaggctatgtgactctccactcttatctgggcccttccaaaagaggggattgtgacatatcagtgaccctaccaccaaggtgatgtgactgttctcttttgcctgggtttgcatattttgggtattgtgacatatccctgggcccaacacttaggggataaaaggcttattcctctaccttatgcacagagaaacttgtgacgtttttctgcattcatcaccaaggagatgtgactctcctacctgcatcctgaccacagagaggattgtaacatattgctagatccagcaccc

SEQ ID NO: 1451 - DNA, 767 bp, Homo sapiens
aaagccagataatctacaaaatcaaaaatttctttgaccctattcaagagctgaggtcacaagacaaagggggctgaatttcaaagagtaacacgtgcctccatggagagcagacatatgaactgtttcacctttatcaagcatgggaggaagaaacagcccccatagaagagggtaacaataaatcagctgaatttattacaaatttctaaaggccaagtgtggaatagcacaccaatttaacataatgacaagtccagaaatcagagcacacacttcctcagaagtttccctttgggtactcacaagaaagcataggggttagaccaaggcccaaaggagctgttctcaatggcacagttttatgagacgtgtcagctgctgatgcaagatatacccaaacaccacccacttcctaaaactcttctctcacacattaaaaagactttcaaccacaaaagaaagggcatcgaaacttttgatatctaaggtcacttgtggagaagtaaaagcagaaattctgccttcccaaggttagaaaaatctctctttatctcaaggaaccaagtgaagaacagggttattgttgttgttagtgatcattatattttttggaagaagggtaaaagtgaaagccacctgtaactgggagatgagtgggaaaatttctcatgctcaagatctcccacagacatgagattgtattggccataatgagaaaatggatgaaggagttgaaaaggctcaatcttgaacccagcaagctc

SEQ ID NO: 1452 - DNA, 762 bp, Homo sapiens
acagaaggggagtgcagtggcgcgagctcagctcactgcaacctccacctcccgggttcaagcgatksccctgcctcagtctcccaagtagctgggattacaggcactcaccaccatgtctggctaattttttgtattttagtagagacagggtttcrccatgttggccaagatgatcttgatctcctgacttcatgatctgcccgcctcggcctcccaaagtgctgggattacaggtgtgagccaccgcacccagccccctctgccttgaaaatactcacagcatcatctcaacagccaatacactgaaacccctctccacactgaagcacagttgtctgtgaagaaaaattagggaagccatagaggaacaatagctcctttgcaaattacagcttcatcagaaggaaagttgaggcaggcatatagtattttattttatacaccacaaacagacaacccctagacttggaattcagaattaacaaaagcattaaatccatcgggctttgagaagggtcaatgttttttcatatgtcttccctgctaccattatttgcataacaaatcgctgcaaaatgcrttcatgtcagatgttggaaataaactctttggggtatagctatttttaaacaacccatagttatacgggtgtttttaaaacattcaaagcctgagtttatgtttcaaatcataagtgatcacaggaactctatattgttggtctggtgctgacctacagaacagagtctgaagtccctc

SEQ ID NO: 1453 - DNA, 947 bp, Homo sapiens
aacaaaattgcagaggaataacaaaagcaaagacttaatagttattctgcgtgggacatgttgacagcatgccaaaagaattaggatctcatcagtctggaggcctaaagactgtagagtaggaaaaaacagataaatggagtctataaagaaagtcaagacaacaaactgattttggagggaatattatgttcctgccaaaatcccttgactcaaaaaagaaaagacagatgatccctcctgttacatgacagttgggtcataatctctgttttattcagagataagaatgaaagtatttttaagtcaatccatagaagatctaggacaccatctatccatcaagagaaaggttgaccctttactgaaaaagaagtcttgaaacagtaatcatggactatttctttagaattaaaaaaagtgagaataatgaaatagtcctgataaatatttattttatttatgatttaagcagtgcgtctaagcatttgaattattgacttgacctcttacattttcaaacgcaataaaagctctcttagccgacttttatttaactgacttacctgatgaactgacactttcccttaatacagctgacacccataactcacctattctcaaataaatacatacatttctgctcccaccattttatgtttaccaactttagttgtgtttgttctccaatttatttatcacactagtacctaaaattgtaaccacacaatattgtataattgtggtactgtaaatatatactaagctgaatagaaagaaaaggatgtaaagaattgttttatgattaagtacatcagtcctagactgcagtaccttatgaggatcattcgcactaaagtccattaaaatgatgtgaaaacagtattattattattactctcaaaattgatatgaaaagtaaaataaactttcttaaaaactcactt

SEQ ID NO: 1454 - DNA, 891 bp, Homo sapiens
agaaggggcatcaagtgatccacctgcctcggcctcccaaatgctgggattacaggcatgaaccaccacacctggctggcaaaaagggattttaaaattaatttaaaacattaaaacaaaaatggttttatcactatggtaatattaatggtgttgcaccggtaggttgctcacggtttatgtttttgatgtgatatttgtcctttatgtgttaggaatacccaagccaagmkrkgkgactgccaatttttgatcctaatagcttttctgactaaacctgttttatagctactatgatcaacatcttctggataccaagtgtttatatgggtagcttgacttgagagattgaaatgtttaatgagtggacattaaccttactaatttgtatctgttaagtgaagctaatttgtagcttatttgtctgatttgtggtatgaccctatttgtggtctgacccaaattatttgtctctctgaaatagcagtgtgttagtctgttatctgcttatttacttcctccaccccgccttcttagtagactatgtttctgggaagcagaggctattatattgttttaattttaaaagatttttatgcttttaagagattattatcttgatcacctttgcaaattcagtgccaagcatgaagctgggtacacattcaaaaaaagtgtgttcaaagaatgccttttaaagtagctgtaagactatgtggcatgctggtccttgatgatatagggcagacagtgtaaacatggccttacctcctaatgcttatgacctgatgaaaataagttagacattttataatggaaattataaatttatttactcatattcatttcctgaggctctgtacatatttggtacaatgggggtatttaaaa

SEQ ID NO: 1455 - DNA, 800 bp, Homo sapiens
  misc_feature 657, 759: n = A,T,C or G
atacctggcacataatagttgttcaataaatgttcactcttgttctttatttttagatgtcttaaatggcattagcactcagcctgctttaccaggttactatatgagattctcctactaaaacagaatgaggaaaatgtacagttaattgatcaattttaaggagaaactgttttcttgtaaaatgtttctaagcccaaaaattatttgatcgcaaaatgttcgtattgaaatataagtgcctaatttcaaaaaggaagctctttagcaacaaagttgtttcctttttttccaatttaagatatttccatctctatttcaaatgcttgcttctaaaaaaaagtttagtgaaataagaggataaattttatgtttttattgatttgaatgacattttcccttggatgaattatgaaatgtctggttaactttagcattagtgaagcttgaatagattttaatattaagcaagtgtttagttgcttgacatgatcagtttacactattgcagagccttaattaaagttttattaaactgtgtaaaccgtgatccagtttggatttgaaagtagatagacatctgtttcaaatattattactacggttagaaattaatagcctttggccggatgcagtggctcacgcctgtaatcccancacgctgggaggcggaggcgggcagatcgtgaggacaggagatcgagagcgtcctggctaacacggtgaaaccccgtctctactaaaagtataaaaaattanccgggtgtgatggtggtcgcctgtagtcccagctactcggg

SEQ ID NO: 1456 - DNA, 673 bp, Homo sapiens
cgacagaagggtgaaacatgactaaagagcttaaaatgcctattctcaggcacatttatggtgtgtcagctatccacctccatgagcatcgtatgctcaggagctcttatcaatacagagaacatggcaaagaaaactccctgaatagaaatctcaatatctgtcacatattcttcattcagtcatttcatgttttataaaatgccaaaatatgaaatattaagtcatattttataacatgattgaatcacttgttatccagagtttaaaatctcatagacctctaatcaatgagtcagtgatgacaatgttacttatattttagacagagattctcaggttttttttttcttttttctgcctcaacagcaagtctttcaaaacagtggctgtcaggtttccaatggtggtaattctcctggagaggaagtgggtttgggtagactgaggcagctccagaggtcatgcagtttgaaaaagcctccttcaataaagtgaataaagatcccyaaagacatgcaggtctcaatccctggaaccttgtaatgttacctgatatagcaaaagggactttacagatgtgattaaattaaaaatcttgacattattcaggatgatctagatgggtcataaatgcagtccaagccttataaaagggaggcagagggagatt

SEQ ID NO: 1457 - DNA, 683 bp, Homo sapiens
acagaggggattgcccagttamrgcwgcragmagttagaactgggactctrgaactarkgkcacagcatggatataatgcctagaaagtttacaatgaaaatctagttcgtatgattgaacactcacagaaagaacttcagaagactccagtgacccttcatgagaagaacatgtctgcggtagccactggtccaaggagaatgaggaaatatgtagagcagctttgaacctaatcagcagtctgaagtcaagcccagtggattccagccaagcacagcagaaccacagccaatctatagaactatgagagaggaaataaatatttgtggctataagctattgagagtttaaacttgattgataggcagcaaaaactttcaaatcaattgttcttattaaacattttgcttttgttttgttttgtttttgagacggagtgtcactctcctccaggctggagtgcagtggtgcaatctcagctcactgcaacctccacctcccaggttcaagcaattctcctgcctcagcctccggaatagctgggattacaggcgcctgctaccacrcctggctaatttttgtatttttagtagagatggggtttcaccatgttggccaggatggtcatgaactcctgatctcaagtgatctgcctgccttggcatctcaacgtgctgggatt

SEQ ID NO: 1458 - DNA, 932 bp, Homo sapiens
gtaccagctcctctttgtacctctggtagaacacagtgataaatccatctggacctgagctttttttgcgtctttctttgtcgcccaggctggagtgcagtggcgggatctcatctcactgcggcttacacctcccaggttcaagcgattcttctgcctcagcctctcaagtagccgggactacaggcatgcaccaccacacctggctaatctttgtattttcagtagagatagggtttcaccatgttggttagattggtctcaaactcctgacctcaggtgatctgcctgcctcagcctcccaaagtgctgggattacaggtgtgagccaccacgtctggccatctgagcctaagtcttaagaagacctgatcatttcaattcatgctcttaggagtctatagtcaccatttgagtcttgctggagaaagcatgtgaaaaaaccacaaggagggagcaagtggaaaggaagargtcctgaaacaacagagaagaatcaaagaaacaagtcaatcgggagaagcacagcctgctcgttttcccagttgagccattgcagccagcctcgaactattccagaaattctagcagaggtaccaggcatgtgagtgagtgaaggagctttcttggaccttctagccctagcagacacaacgcagagcagaaacaagccatctccactgttctgtttgaatccctgactcacagaattgcatacaagtaaaatggtcgttatattaagccacttagttttaagattgtttattatgcagcagcaggtacgtgaaacaccaaggaaatttttaacaatgttcaagaaaagctgatatttccttttgtttctcttccctataatgtttggctctatgcaagtggaaaaaagagtgtgctttcgtgttctgtccattctaccagaactttagctgaagtca

SEQ ID NO: 1459 - DNA, 699 bp, Homo sapiens
ggtaagtactcattaccagtatttgttatttaatttcacttttgtctacattcccttgtgtgaaatggtttggataaktaattaaggaaaactttccctcagggacattgctgatattgcaatcttcactagatacacttatctctacctccgcctccacctccaccttcacctccatctcttctctgtctctatctctatcttcctgttgtttatctatctaattatttataaatgaactggtgggtttgttgttgttgcagcctggctaatgttatccagacatatctgaaacctcatgagtggcatggaatggcagtccctgcttgaaccatttacctcctttcctaacaccaacaatcacacacacctgacactgacctgaagcctctggcctgtcctcggaggcaaagactgggtagacaagatgcctggttaccagcaatcttctgcaatttcctctgagctattgagattgcttttctctttgctcaaattatgtgagaaacttttaaaaaagaatttaatgtgctcttttgatatttcaggtgttcattcaaaagcctatgttattctctgkctctctctctcttttcctagttgggtaatcaaaatggcacaatcagaaatatttatatctgcaacagaaaagaagaataaatttattcatgcacaagtacattatgtacatatatatgt

SEQ ID NO: 1460 - DNA, 576 bp, Homo sapiens
gwkrwtgywkyyksasygatgmrksctasgkmtgsrwsaarasgtayrgmrgstggaggatgtccaccaactacacttttgccaataggttctcttgcaggaagatttgagcagcatatgcccatggtcattagagtgtgacactggagaagttttatcatctctctgaactgcatttgcaaaatggagttaatgtcatttttgttaccaggttttgagaggactaaataagataagtaaaaagtatctggtatagtatgtggacttaatattagtagctgactgtaattctttttccgttaacacatatgagcaaactgtggctcagagacagaaaactaccttcctgaaggccacatggctagtaagtgccaggtacaagattaaaatccagcttaacccaatgtcctacatatattatattcaggcacatacttatctaaaaatctatgcccaatttttggaactagggactgcatgaacactctatattctataaagctgttcatggagaaacatctgccagccctggggtgtgcacatgtgttggttttacttaatttcctcatggctgac

SEQ ID NO: 1461 - DNA, 738 bp, Homo sapiens
caatagtgggtgaagcaaaggccgtggagaggcagacgaaacggactccagcgcaagccacgctgcaaatctctatgccaggcagttkgtgcctctgagctctgccatgccattcccttttcctggatgatctcttcaataaacctttactgagccactcctggggcagggattattctgcaactgtgctgcaaaggtaaacaacctgggctctcttctccagaactcatttccaacacttgaagagacaagtaagaaacttcaagtcagtgtggagagtgctgcaagggccagtactggacatgatgggagacactggaaagtcccaaacctagtttaaggtgttaggggacttcctggaatcggggacatctaagctgagccctaaagtaggagacagtcagatgggagagagtaaagaagaagacatttcaggccaaatgcctgaataccataccctggagtggtcaggttggttctctggtgggaacacgaagattctcctgatcttctcctccctactctcaacactctcaacattcgtagtttttacctccactaaatactctttcctatattatagtgatgttacccctttatctactggaaacttctgaagagaagagactggtcttatttttgaatctcctaaagtatccagcacagggctcagcacacggttaatgctttaaaaatattttttgataagaaatctcaggcctaagaatccctatcatg

SEQ ID NO: 1462 - DNA, 594 bp, Homo sapiens
gcatcacatagggtaatcaaaaaattaaaaataacctacatgctctcaaagtaggaggaatggttaaattatagttgattttgcttkgtctcycttggtttcaaggagtagaaattctaactagattaagtaaaattgggctttgttgaaaagggtaaaaggtgctctaataaccccaaacagcaagatcactgaggccttttggcagtggggagccagagctactttcccatttcacccgttcagggaccaggctagtcactgcttcttcctctgtagacctgctttgttctcagcttcttcttcagccagtcttccttgtacatggctcagtgttgtttgccaccttggacttactcagtttttgttaaaattcacatatttccagaacaggaatctgaaagagctgttctttttgagccttaggtgggtcagtgaacaacctgtggtttggtctttttcttcatccccttccaggggtctgtatttaggtttagatagctagtgaaaatgaaatggcactgggtaatgacattgattcaatacatcttggctaggcacactggctcacgcctataatcccagcactttggg

SEQ ID NO: 1463 - DNA, 850 bp, Homo sapiens
acaaatatgccctggtaagagttctggccactgtgttttatacccaaaatgctaactctcccaaagacctgagatatactcagtttctccttctttttcaatataccagtttctctctctttcatgccatgattttttgtgacatggtcttctatagcttgggataagaaggaaaggtatttgtgaaaaggaatgaatatcctttattacaaacactggacctaaaaatgctggggcaatataarmkgmskasggcwkmsagaagamraywgawkrkgatagcaactttcactaggtcatgttgcggaaagaagcactgcaaaggtttgtttctagctctcactatatttgagcgatgggttggctgtggctctgttgctccttcatccaggattcaggctgaagtagaagccccatctgaaacatgccattcttatggcagaaggaataaaacaagagagctagcaaaaccgtatgataaacctatggtttctgctccgtgcatgtgcgtgtgagagagcatatatcaacccactcacattctattggccaaagcaagtcacggccaagcttgaagtcactggacaggtaaacatcatcattgctagggaggccctgggtcacatggcaatgcatgcttatgtagaatcctctcacatgtaggaargtggatactggaaataataccattcatcacagccattgagcacgaaagcatccctttcagaaattatcctcattaagagactcagtagagaaaaccacctgatagatagtgattgaataaggtgaactggacccttgacctcctacacctcatggctggtggtatctcagcactcagtgattc

SEQ ID NO: 1464 - DNA, 680 bp, Homo sapiens
ggtttgcatttttaaaaacatgatctcaaattcaaaggcagatgacaaattgggaaaacattgcagacagtttgttaatatccttaagatatgaagtacakmwkrkatatcaattgaaaaagccccagtgctctaaaaacaatagggaaaggtcctgagcagacaattcacaaaagaagattccagatattcaaaaacatgtaggaaaatgaatatgaagacatgcaaataaaaatatcattgtcataatgtgttatctagcaaactggcaaaacttgaaatccttcacttgaaaaagtgaaggattgggaaccaagattctaatctaaacttctagtatccttctagaagtttaaatagttgttaactttatgaagagcaatttggaatatgagtgaagacaattaaaagattgggtgcatgaatatgtatcatagtttcattaaacacttcaaggaattggaaaaaatctctatgccctaatgtgatattaaaacatgattttgggccgggcacggtggctcatgcctgtaatcccagcactttgggaggctgaggtgggcggatcacctgaggttgggagttcaagaccagcctccccaacatggagaaaccctatctctactaaaaatacaaaattagccgggcatggtggtgcatgcctgtaatcccagctactt

SEQ ID NO: 1465 - DNA, 782 bp, Homo sapiens
aagtttgagaacaatttacttctctggttcctgtttacacttctagtctgggggactaaacttggaaatttacctcaaaattctaaccatcacgctcttgatagtcactggttaaaaaaacaaacaaataaacaaacaaaagcaaactcgtctttcccaattttcccttagagtttcttaatcaacatagttgctcttagattcaggttcagacatctccaaatgaacatgtgaaaatgcaactcttgatttttctaaacagttatacatactacagccatggtgatcatcttaaaacagtagcagaccaatggttctcaaaagttactagatattagaattatgtggagagtttttaaaaagtaactgatgcccatattcttaaccaagtgtattagtttgttttcacactgctataaagacatacttgagacagggtaatttataaataaaagaggtttaattaactcacagttcctcatggctggggaggcctcaggaaacttacaatcatggtggaaggggaagaggcatgtcttacatggtagcagatgagagagagtgagcaagattgaggaaaactgccttataaaaccatcagatcttatgagaactcactcactattttgagaacagcatgggggaaaatgcccccatgatccaatcacctcccatatggtacctccctcgacacatggggattatagggattacaattcgagatgagatttgagtggggacacagaaccaaaccatatcaccaaagtaatgaatcctttcta

SEQ ID NO: 1466 - DNA, 625 bp, Homo sapiens
gatctctgagtctagctacaggcctgcgtcgagttcctgtgtttactkgttgaacattatactgtggcaattcattatttcttgtaatatttatttttaggaaaatttccattcctcatcttcaaacaataatttatacattaatctcaggtctgaaatgtggaagaaagaaatcagaaatagttaaacgacattctgtccatcctattagtaacatcccgtttttccacattaaaggaagctgacatctggaaagggtatctagatagtttaagtgagwtgtcctaataacttgttctctgtagaagccattgcaatttacaaagccttttcatatatactgtctccttcagtcttcacaacaaacatgtgaaagagatactatatgcttttgacaggtgagatatgaggttcagggagattaaataaaaagagaatgtgatagaactaaggttaaaaccatcattgctaattccagaatccagcaagtgtgaggaccagggaagaagtgtcactatctaacaagtcccagctttgggactgactctgcaccctaagcgttaaccatttggcagttccagacccaaaaatatttcatcatgatgttacgttttgtgagatgctc

SEQ ID NO: 1467 - DNA, 775 bp, Homo sapiens
gggggtgcatgactgccctgagcagccaaggagccaattctttaggaggctgagtgccatttcagctcaagccttcacggggcatagccaaaagcaacttggaggggtgggtggagcatctccactgcagcttggccccaacaaataggatgtagcagcagctcatcttgtggatggtgcgcaacaatgggggggcggttcaacagcaacaaagctggtgggatggaagtgtactgtggctacctatccccagaacaggacacattccaacaatgtttctgatttcaaatgcagtagccacgtgggtcacagtggtgagtattttctcctcctctgtggggagtgtagctgtgtggattccagggagttccctcadctgggcttagtgcctgtgagaactgcaggggtcaccagadgtgaggactgtaggtgcctaaggtggtgatgggggctgctgtggtcctcttccttaccttttccctgcaaggagaatttccccctggttccaactgatcctgatgtarggatagggtggtggargtgasgtgtttccttctgttgtctatgtggccatcttgggtttctgcacactacagagtttctaatacacctttaatgtattctaacatcctcccttagttattttcttctaaatgtagwtgcttacttattgytttggctatctttgggagggtggtggtgagtattgggagcttctaggtaggttatcttactgatgtcataaaaagtggatttcaaatgctctcaccaaaaa

SEQ ID NO: 1468 - DNA, 622 bp, Homo sapiens
caagggagtataaaataatctttgtaactattcaagcatgataggagaatagcatgttgaaacaaaatgatgtttctcactggcagatgcaagcaaggttaataacatattaatgttttcatgttcttatacatctctagagacttgttaaaggtcaaagcaagaaattcataactgaattcagaacaacaggcatagttgctttagcttgaaatacctatgaaccccaaccttaagaagtagatatcagtagatttattcagatactagatttaattcctctatgaagtttaacattttgatatttcaaaatttactgacacttattttatggcacaacataaaggctaaagaggaagttgagatttttacacctgctgtgcagtaatgagtgacctctttctccactgtkttargagagagtacatgagatcttggacytccattcccacatggaggtaatgagacattcctccgtcttctawctggagtggtgtgagaggaggcttaatgcagcatcaggaatttcaacagtgtccaatagtaacaaagccagacaccctcagtgtcaatataggacacatgggagatggtaaaaaggcattcctctccctcccagcca

SEQ ID NO: 1469 - DNA, 962 bp, Homo sapiens
tttggccgagcggcctacggctgcgagaagagacagaggggaggacattcaggtggagaaatcctgtaggacactggaaatggatccagagttcacagaagtcaggataaaggttagggctcattagcatctgggtgatgaacgaaggcttggagagaatggggtcccttatggggagtgtgttgaaggacaacaggccgaagatagaaacctaaagcaaggacagaactttctttcagagctggtagaagagaagtcccaaaagagagacaaaaactggttagggagatagaagaatcacggaggccaagagaagagagtgtttccgagagggtgccaggaagggacagctaagtctgctctggaggtcagggatgtgtacctaaggaggcaacatctaaactggtcttgaggaacagccgaagatggcgaacgggacagttcctgaaaagggaatgtgagatttggcaatcaggatagctgtagcctttactacggaaaagtcagtggtggagacagcagacagattcagcgggctgaagagtaagcagaaggtgaggatgggtaggcaggagatagaaaccattattttttgaagtttgatactaaagagaaggaaaggctaatacttgaagggggaagttttctaaatgggtgggacttgagcatgtttactrgcagaaggagakggaggtgagaggccgaacgtaagakaggcaatagtgggtgaagcaaaggccgtggagaggcagacgaaacggactccagcgcaagccacgctgcaaatctctatgccaggcagtttgtgcctctgagctctgccatgccattcccttttcctggatgatctcttcaataaacctttactgagccactcctggggcagggattattctgcaactgtgctgcaaaggtaaacaacctgggctctcttctccagaactcatttccaacacttgaag

SEQ ID NO: 1470 - DNA, 698 bp, Homo sapiens
gctytgkyckarssrcytwykrmtscrmswarwcsmmwgwrrgagccctacttttatttatacctatcttgccaatgagaggccaagtcaatttttcaaggttacagagctattaagtggtagcactggaactctaacccagataatcttgctcaaaaattgtttttctaaacactaatctaagctgcctctcacatgcaactaggagggcctattgctatagaaaatatatttaaaaatggatacctgttgtagggatgatgtcagtcttgagatacttagagaacatcctcttggtaggtagcttgctggatgtgagtcttaagtttaagaaagatggctgggttaaagatacagatttaggagttgccaatctatgggattagggaaggtcgaacaagtaggtgagctcacttagtggttcccaaacactaatccacaggccatttcggatccatattgaagtttataacaactctttgcaaagcagatcaataaggattgttgaggagtttagtgcctaaattctcttttccccttatgtaattacagtgaatagagaatacacacaaaatatagtcattggaacttagctaagacctaaagtcaaatgggctctattactcactctgtacacctaaaacatacaatctgtcaaaggaaatagctgtctacacaggagaccctgtcttacctac

SEQ ID NO: 1471 - DNA, 599 bp, Homo sapiens
gtcctactccatttccatcccatgcctctttactcaatggatgcaattattcttctacatgttccttctggccatgkgtagctttgtcattttaattttaatctatttggaccctgtgttatctgggatgaggtagagtgatatttttattttctcaggtaattatttgcctaatgcctgtttccaaataatccaccatttccttacaatttaaaaatgctccagcatgtttttaatagctacacatatttgacacattttctggagaatttctgttttatttgtctatttcattattcttgtatcattatcatattatctcagtagctttgtggcaagtattaagatctactatgccaaatgtctattcactgtaccatttttcagaaaattctttttcaatcatctcatatttattcactcctgtagaatttaaaatcaacttatctagcccaacattaaacctcacaccctagaacaacaacatgtcgtagtaattctgactaaaattgctggaaatttatagatgaatttagggtgtattggcctctttatgatagaagctttttattcatcaatgtatgtttctccatttattt

SEQ ID NO: 1472 - DNA, 949 bp, Homo sapiens
gatcatcaaactttagcaacatcaaaatctccaggaaggcttgttgaaacatacatcattgggtcctaaccccatagtctctgattcagtaggtctagggtggggcccaagacttgcatttctgacaagttcccagatgatgctgatgctgctggttcagagttcatgcgtaaagcatgattcatatagaagaaatagtcaagagacagtttcaacaataccatttccctcaattcacccatctcaaccttaaaatttctctatatctgcatccactgtttcttttttatgaaaacaagtttatctgcccactgcactccaattcaattactcaaagactctttcccagagtgttttaaggcaagaagaaagctttggagtcatctctcaatagttgcttcttaaattaacactattgacatttggagttggataattctatgcagtgggggactggactgggtattgtagtatggttagtgagcctctatccactagttgcaagtggcactgcccccttcagtggtaataaaaaaatatgtctctagaaactgccaaatcacccttgttgagaaccactactctagtcaattgtatctttactctctccttctttgttgggatttaagggtgaaaattcatcgcatgccttcctgagttggggccagttgaraaacaaaaacagaacttgaaaacatggccatcagaatataatttcactgttgctaaagctggycccagtgcacaagtaggaatgcttctcctgggagatgtttgggttgtgattaacaataggtgaatgaattctggctttaaactaacacagaaacagaaaaccaaatactgcatgttctcacttgtaagtggaagctaaatgatgagaacacgtggacacaaagaggggaacaacagacgctggggcctacctgagggtagagggtacaggagc

SEQ ID NO: 1473 - DNA, 697 bp, Homo sapiens
gggagatgttttgactgtagctgtgacattgtgaatagcacaaataattgagcaaataatcttccagtatttgaaaactattatcagattcagcaataaagtcattcatatggttgataaatgagtgaagttctcgcatacattctgttgttttactttcgtcttacttattaaagcaaataaaaatatcaaacaatgttcctgttggaagtatgcttgttcatcagttgcwaacactaggttggctacagatgtaagagtttagcaaagatccataaaaacattctttgaaagtcaatttgtctacatggaattttcagtaaagagcactatttcttattatttgaaaattgtgtgctagccacctttatatcagttaaagctcatgtatttgtatgtgcatgtatttttttcccctggaactggttattaaatgtttcccagtggaacactggctttaggcctccttttatacttcctcaggaaagctttgrctcttttcttgataatctctggggaaagggacttgaaggaaaatgtttgctctgtaggttcatggcaggaaaacctttagacatgatcttagcaaatattctgagccccactccttctgtatcacctacctatagccatgcagttccttcagaggctcctaatttgggtatttactgcccagatttttgcatttctttacctt

SEQ ID NO: 1474 - DNA, 979 bp, Homo sapiens
atttatctctcttattattaagcacgctgcctccctacatcactagggattgactttggctgcctgtaatggaaaacctaaaatgctggcgtgaattgcggggtttcacttctcttgtgctaggagaaggacaggggtagtggctccagactggcacagtggctcttccatgtcaccagtgccctttaactttctcctctgcctttctcatcattctcaggtttgcaaaatggctcttgtacctctgkgattacatccaccttccaggaagtctaaagggcaaaaagtgaggtcaaaagggatgagccagcctagtgtgctccttctattattagaaaaatgatagctttcttggaagaccctaactagtgagcttcagcttatgtctcactggccagaagtatgccatgtggcaatacttaactgcaggggatctaggcgagggaggtgttttttcattgttgttttctcatgaggaagaatgtatggctgcctggagcaaaattggggtgctactcataaagaaraaaggtgaatgtaggcagctggcattgtctggcatcctcccacgtagaaatgactcagacagacacttgcagaatgagtggctttaactgtggacgtgaagctttataccaagaggggaagatcaaggtctagaatcccagtgagaaacaacacagggattttttgctgatttgctcctaccatcatcacacaactattttggacatttagctcctggcatccacttgtcttgttgtttttttctgaaaacgatgggagattcctacatcaagacctttgtgatgtttaatgtacccaggttctgaggcctcctgagttttggttggtcataacagaaacagattgaagaatgtgtgcctatttccagacataccccttagataatgacaaatatcagcataagaagatccacttgtcaacctcgcatcacagggagtacagggagtctgtg

SEQ ID NO: 1475 - DNA, 678 bp, Homo sapiens
gggaacagttcactcctcactgagaactaataccaaagagagaaacagaatacattctaagatagtaccagaccttaaaaatagatgacatggagtaatggcagaagagtcaactatttctcaagggtaataaacaaaaattctatacacctaaagtacagtgctttatatttttcttaaaggagtgggtggaggaagggcttgggcttacagcttgcctggaggcttctcttctcttgagccctaaatgaatccttcacatcagcataccctgcccacttacaaagagccataaatcagctcttccctacaaaggataggtgtgttagaaaaattgatcggaatactgatacaggaaagccacgccaactacctttgttaaccaattttttatttaaaaatatgaatatataaccagtgacgccaaaaagaaagactagtcccaaaggaaatctaggaaatctaattcaaggtaaagaaaaaaaaagtttcaagtataattgcagtccttagaaagatttgaaattatttgtgttaaataaaaagaacagattggtatgaaaaagargtaattacagaacaaatgaacacttgagaattaaaaatatgattgrmmaacaatagaagggatgataatagctgaagtctgaaacgttgaatataaagttgaaaactttt

SEQ ID NO: 1476 - DNA, 599 bp, Homo sapiens
acagaagggtacgkytkcgasaagdgtttggaatagtttcagaagaaatggtaccagctcctctttgtacctctggtagaacacagtgataaatccatctggacctgagctttttttgcgtctttctttgtcgcccaggctggagtgcagtggcgggatctcagctcactgcggcttacacctcccaggttcaagcgattcttctgcctcagcctctcaagtagccgggactacaggcatgcaccaccacacctggctaatctttgtattttcagtagagatagggtttcaccatgttggttagattggtctcaaactcctgacctcaggtgatctgcctgcctcagcctcccaaagtgctgggattacaggtgtgagccaccacgtctggccatctgagcctaagtcttaagaagacctgatcatttcaattcatgctcttaggagtctatagtcaccatttgagtcttgctggagaaagcatgtgaaaaaaccacaaggagggagcaagtggaaaggaagaagtcctgaaacaacagaaaagaatcaaagaaacaagtcaatcgggagaagcacagcctgctcgttttcccagttga

SEQ ID NO: 1477 - DNA, 1003 bp, Homo sapiens
ggtgcctgtagtcccggctactctgaaggctgaggtgggagaatcacttgaacctgggaggcgaggttgcagtgagccaagatcgtgccattgccctccagcctgggcaacagagtgagattcctaaaaaaaaaaaaaattaataaaaccccaaggaaggaaataaggaaggaaggaaggaaggaaggaaggaagggaaaaaaatcccctgaagtataaactacctccctattcctyttytaaaacaraggtcctcartccccaggccgkggacctgtacctgtacgtggcctgttaggaactgggaccgaacaacaggaggtgtgcggkgggccaraaagcattatcttctgtgttccgcctccttaaraacagcagcagcattagattgtcataggagtgcaaaccctattgtgaactgcacaagaaaaggatcttctggttgtgcactccttatgagaattaaatgcccgccccctccatgctcccatggaaaaactgtcttccactaaacctgtccctgttgccaaaaaggttggggaccacggctctaaaatattagatgcagacaactcagatgcaataaatatacatttggaaaatccttcatcataataaggttttctaaagagtttggttaggttgaaagtccagttctgctcctggaccatatgaaaaggtcagacatctctgatagcctgaaatctcaaacatctccattacttatactcaatcccactgcccctaatcattctttgcctcattcatcaaactagtatttattgagtacatattatgagccaaacactgttctaggttcagtagatacagcacagacaaaggcacacagctgtttgctgtcatgggtctttaaattatatcactcagctatgctcagttatgctgagttggatatttgcaacatatttatgtaccgaattttcaatcacataacctgtacaatgggtcatgtctaggcttggtttaatcatatacagataat

SEQ ID NO: 1478 - DNA, 972 bp, Homo sapiens
agaagggacaggttattgtcaaagccattttgtwgwsrkgtttcccattaggaaaaaaatgtgttatcattaaaaaggaaggcttgtaatagataggccaacagaagcagtttccagattaatttatatagctatcattagttgtaataggagctatctatggaaatcctgcatttacgtatgaggactggctgaagggaatcaagaaatttgaaaacccataatatgaaaattgkaaattctcaaaaggataaacacaaaagtgtgaattttttatatgttttttaaaatatattcatattataccataaaggagtgaggaagaagaagtcttcttgttagtagctttctattggtatttaacatattctaaacattttcactaaagttgattgaaaaattcttatgataaatgtttttgaacacttttatgtcaatttaggaatctgggcactttttgggctaccaacttacatgacaccatctctacattcaaggatactaagtaaagagttccataagtaatttactgataaatatgatatttaaggtatataacttgaatcacatttaaaatataggttattttaaatgtgaaaraagaaaaaaagaataatcatacatcagtgcaaaaaaacacagcagaggtgaagaatattgttggtcatagccagagtatatcagtagtcattaaaaaaccaaaaaggtaaattgagacaaagaaagaaaaacaaaacttgaagctttagaactgcatgtcctttctctttcagaaaagggagaaaggggctggaatacaaggaagggagtctatgcgtgtcaaaaatgctttggcctggccgggtgcagtggctcacgtctgtaatcccagcattttgggaggccgaggaaggccgatcacgaagtcaggagattgagaccatcctggctaacatggtgaaaccccatatctacttaaaaaaaaaaaaaaaa

SEQ ID NO: 1479 - DNA, 637 bp, Homo sapiens
ttrgssrakyrrmmwasrrmtrctgcmswaswsacagawgskactcactgaatatttccaatttcctacctccaaaacagtggacataggactgtgttatgggatgctgcttcctggctactttgcagttgaggacactgatgtgtctggttctagactgtgacctgtggctgaatgtttgattgccaatacaaaactctgcaaactttcctctttctgacttcataattagcagtgttcaagtaggtgactgctttgtcatccaggatccctgggtgatatagagcataaacaaacaaacaaaaaaaagatcgttgtcattttaagccactgagatattgagggtgtttgttactgcaacataacattataccctgcctgatgctctcaacatcagtgcccagtaagaaaggatgaatgtggagtgaaattgaatcctgtgacaggaaacagtggggaaactaaggatcattaaaaaaggaagagacatcaagttggcaaatgatactgaccaatcttctaacacacttatccccgaaggccttgcaggaggatagaactggaaacttcacggcaggtgtgtttacctacccatccatgccccctccagtgaaaagcatgatagggcaactccttc

SEQ ID NO: 1480 - DNA, 837 bp, Homo sapiens
gtgatattggttagcaaataaaattcaggatacatattccaaaaatgctgtttatgtaattaatttggtgaagtctgtcaaaaaaaccagctagttgctgtggccgtgttgactgctgtggtaaattaagtgatgccctaccaaactaaagacagtgtcatgccttccaaaaggcccagagagagcttsaggagagaataggtccatcctcatgtagccgggagaattgcagaatgaaattgctcccagtattactagtaaaccttcaaatttcatttactggggcagagatagttccggttttaaggaaataatagaaaatcatggtctgaaaattctcaaacctgaaaggtgatattccatttcaggcagaagaagaatttgctcctcaaaatagaaatgttgaaagagaaggaagttgacgtttaaaaaaagtagttgtgaaatagcagctgtttcttttagctctgatattcaataaaaataaaatttattttgcctttaattgtattttatttgcccatcatacataaaagtacttacattatatatgaaatattgtatatatcaggaacaagtgtaaagcttcatgaacaatttggagtgacttatagttttcttaatttaattatttttactttagtgtgctctaccagcagtttccactactatttaaaccttataaacatcttccagacattgaatatgactcttctgtttgtttaaccttgaattgtakctgtcttaggaatgaaaacaagattggtattttcataggaaaatttggtaatcttaattgcttggaatggactgtaattcaatttggaactttttttc

SEQ ID NO: 1481 - DNA, 637 bp, Homo sapiens
agggtaaatattcatatagaaatgaaaagttagtagatttacatakgtgtataacttaatttgaaaatgccttgtaaatattkaggaaagtcagaaatacttgtttttagagttaagttgcaaataaattgactgccgatatattttataaatacattataactgacaggtactcagtgtcttttgttatgtagcagacataagaatgaagacttggagggctagattaaacttaaataattaaaaaccattcaagtcctttcctacagccatttgaggggaaacctaatgtaaaataagaagccracatcatctctagtttaggtgtttagatttagtgaccacgggatggrgaaatcacctggttaaagtcagcttgaagctctcgtgatggtttttgtttctaattagaaaaataggaataagtagtgttycacagattctactatctttcttcaacagccttaacttctcattaggagcctaatatctacagtacttccttttttgtagattttaaaaaattgagatatatcctaatatagaaaagtatacagatcaaaaatatctagcttgaagaatgtttgcagagtacgcttgtacatgtagcacccagactaaaaaacagaatcttacc

SEQ ID NO: 1482 - DNA, 624 bp, Homo sapiens
gggccattctccatcgctgtgcttgtatgagtccaccttgttgcttccccctgccattaacatgcaggttcactcctgtgccagcactaatgtgtgcacagatgctggcaacactgttctccccccaacccctgctaccaccgccaccaatgctgccggtgtgaatgcatacatggacaccagcaactccatctctgctagtgtactgcccttgctgtgctgtcatcactggcataaacatgtgcaggaacaccacctccctgctcccacagttgctctgtgcaagccaacatgtgtgcaccttgccacattgctgtggctgctggtatgcatgagccagcatggatcccactgccactactccagtgacatgctttgaccagcacccttccccatcagagtgtggtggccagtggacaagaacacctcagtctctccagtgcagcagcttcctaaccttgaggggccagagaacaaggctgggggcccagtaccagcctcccagagttaaaacatgcagcccagcagtgtagagctgagccttggctttctaaaatcttccagarataaatgaagccagttgactgaacccatcatatgccacaatctaactcccagggcatc

SEQ ID NO: 1483 - DNA, 611 bp, Homo sapiens
agaaggggaccagtagctggaactacaggcacatgccaccacacccaagctaatttttgtattttttagtagaggtggagtttcactgtgctgccaaggcttgtcwmamaytgcmtrkrmkmamrtrmwsmgmykgsctgggcttcccaaagttctgggattacaggcatggatcactcctcccagccccaagcagattttatatcatgatactttgggccagccctcttctgatataaatggaatgcttagctgtagatattgagagattatcctgtttccaaagaactctcacttatccctatcatttccagttattctccattcaaaactggctgggcttgctgtcttaatctatttgggctgctataacaaaatattataaactgggtggctaataaacaacataaacttatttctcacagttctagggactggaaaatctaakgtcaaggtgtcagcagatttggtgtctagtgatggtgtacttcctgattcatagacagcactttcttgctatgtcctcacgtggctatagatacaaggctctggggtctcttttataggcactgatcctactcatgagggctctgctctcataaatcacctac

SEQ ID NO: 1484 - DNA, 660 bp, Homo sapiens
gggggattaaaaaaagagtcacttttaactggaattgtcaaagaaggcttcgaaaatatgtggcaaatgaaacttctttaaggaggatgagattaattgtgtagtgatatggtaggggatagaaaagtagggaactccrggcagtattgtttcatttatccattcagtcatcaccaggtataatgccatagtggcaggaagcgtagggtgatttgggagaatatttatgaattgcctacccagaataggagacacagggtagcacttctacaaaggtgacatcaatatggtgtctttaatgctcaagtaacagtttgcctatgatggttaaaaggaataagaacagatatgttggggagaggaaatagcacatgcaaaagcacagatacatacaggtttatggagagttcaggggactagtagtgaattggtatggatgaagcatagtatgaatgtgaccatgagcgaaggggtaaacctgggggagctcaagcggttttagcaaatagtgaatccctttacctggtaaatatgaaggttgcagagaaaattaagatatctatctatctatttatctatctgtctacatgaaaatgtagacaagaattagttttcagccacctggaataccaagttcagctttctgaatttaattttaat

SEQ ID NO: 1485 - DNA, 763 bp, Homo sapiens
tcaacaaccacgcaaatgtcagcatccctgaaggacrgaggkggaggcttagaggtgggtcccaaggaagagaccctccagagagcagggagggctcgcagttgcattttgagaatccaaaataaatagagctagactagagggttctgtgtggctcaatggaatgagcaaggattctggagtcaggtggacctgggttgaaatcttggcttctcagagcaatggatggtcttttcccatcttcatagcctacacttgattaaggtgtaataaaacccaaagggagggattgaaaccgtctttgcaaaaatatgactgagacagtgaaagagatctaacttaactgactccatcttgcttccaacctccaagctgtccttgttcattcctgggtgtaggctgaactgactttgggagaaacttacagtttatagtttaaacaaagatggtaacagcactttcccaaagcagacctccttcttgcctggggactagattgcctttgtaggactaacattagccacaagattagaaattatgttttaggaatcatgcagctgggggctacaacattctgatcctccctaaactgctccaaagttcagtgcttattttgcagatcctgcacttgatggatcagctggccccacgcagatcattaaactggctcacctgatcttgctgtggcccctacccaggaactgactgagcacaagaagacagctccgacttcctataatttcatctctgaccccaatgctcg

SEQ ID NO: 1486 - DNA, 737 bp, Homo sapiens
ggggttaaatatactgtgaaaataaaatataaatataacacaaatataatatgctttaatttgttctgttaaatatactgtaaaataaaatataaatataacaatatataagtatactgtaaaataaaaatattctatgaaatgaagagatagattttgcagtattatttggccatgaaagtcaatgcatatgaaacaatatcattctattattttaacataggctaagaagaaatgtgtttcatcttgtaaaaaatttaggtgtatctgagcagacaaaaagtcttctggctcacacaggcttctggataggaaaccatgtcatgattctctcttcgttagcttctgtcttataaataaaggaatttgataggctgtctggaaaaagattgctgttttaaattggcctctggtcttctatgttgaaaataaaatttaaaacttctgttatcttgtaaagtttggaagcagtttaatgccaatgaatgtcttttgatgatctaatttatatgtaatagggtctttgtttcctgtttccacttcttatttcgaatgttaaaatgatagtctggtttcaatttagggttgttattcactggaacactttagagaaaaaagaaatccaagtaaaggtatctcatttggcagataatgctcattaatgaagaaggctcatttcagaccaaggtttagtaagtgattccaaagtagagctaacagaaatcaaccttcattac

SEQ ID NO: 1487 - DNA, 935 bp, Homo sapiens
ggtcattactcagtwswgarggggaaggtagactctttccaracctttgataaaggggctgctcaaaaaagccmcgaccttgggcctctgctaaaaccatggctttaagtaaggagggagcagatatataaaaawccttatccctctttctaatctcttatgtcctgtgagtgtcacccattgagtaaacccaagtggaagtcagcaggaaagtagctgggatgatgcagtctttacaggctatgatgtaaggaagcatgagattaatgagggcagaggggtgaaactgcttccagcttgacttccatccaatgsttgaggcatcttggagattgtcagtgacctacagaactttcctatatatacaataagaggagttaattcaagaccdgtgcataagccaatcatcaacctcctattgaggaggaagaaatgagaggcctgagaaggaaagtgcatcaaactccccttactaacatcatacctgtcaggaaggaagcagatgagggctgtggggagagcccatccatcttttgtccacgtgggtgttcttaaaaaagtgatttatgatgccagagcagtcttccgtcatagcacacttagcatttactatgttcataacaagttagaaaagttttgtgcaagcagagcttggggaaaacaactctgagtttaagaaattcagtttaagaaacatggaaacatacttttcactctaccctggtcaaaacctgtctactctttaaagcacatgtaatatcatgcagtgaacagatcatggaccttggggaccaaacagacctgggcttgaattctagtttcactgcttgttagctgaaactgatcctgtttccccattcatatcatatctaccttacctgattctgggattgttttgcattagtttgtataattctattggaaactctttgtag

SEQ ID NO: 1488 - DNA, 538 bp, Homo sapiens
ctcggtgtttaaaggctttgggtccgccggggctgcagcggcggcggctccgaagcgcttgttcttttttgtgaaaggcgattcctccaccacctcttaggatcttgggcaagtcactcagcctcgctgagcctgtttgcatcagtagggttttgtgaggctccagcccttcaaccgaacatttgctgagcatctactgtgtgcccagcagggccttcttagatcaggtataaggcaggagggaagcgtcgggagtcccaggcctgctgcctctgtaaccatgggcaggtggttcaacattacctccccttcttccccactgctctgccccatcctggcttttattgtatctcctctaaaagggtgtgagctccacggggaggtacccatgtgctttgaggaaggtctgccccagtttatattcaataggtactttttgaataattattgcaargactagttctcagcacagagcttaacacataggaggtgtttgataaatggcaattgttcatgcaataaagaacaatagcaggcc

SEQ ID NO: 1489 - DNA, 756 bp, Homo sapiens
  misc_feature 684: n = A,T,C or G
ctacggtctgcgaggagacgacagaagaggattagcatatatattttatgttataaaaattaaatactgtgttctcataattaaactagagaaaacgttaaaaatcataagagaaaatatatttgctatttattargtggaaatggatcattgtaaagtctacatcctcactgtcctcacattgagtaagctgaggaggaagaggaggggttggtcttgctgtcacaggtgacagaggtagaaaatccttgtataataagtgagctcatgcagctcaaacccatcttgttcaagggtcaactgtacttgaatggatttttttccctgtcataattaaccacccacacacatcttactagaccaaaaaagaaaacttgtcaagcaaataatctcccatttcttgggtcatttggagagataacacaggccaggttatatgtcctgaaagatgagaatgtgtgaagtccccagagagtctgatacgaggccttcttccagggagtagtggtctggccgctgcaccagcctgccccctgccatgccctgactcacctgcacatcatgggtgctgctgatgcccaggcttcatggctgagcatggcacccttarcacccctcacctgttacccaacggagatttgtgggtcggaggcatttcaattggagaaggatggaatggctganggcaggaaaacttaacaagcatgaagtctgcaccctggctgcacatgaaaatcccctatgggcattgaaagt

SEQ ID NO: 1490 - DNA, 1013 bp, Homo sapiens
  misc_feature 384: n = A,T,C or G
agaagggcagtgaagtgcacatagtaaccctaaccgtgacccgaatcaatagaacacttagaattatcacaaacaataataacagataatactcatgtagcatttactatgctgcagacactgttttaagctctccaactatatttactctccctgcaactctgtgaagtaggtattgtaattattctcactttacaagtgaggaacagagacataaagggtaaatgtcttgccctacattactcagctctgcactggaggaggtgggatttgaacctaggtggtctggctcagagactgcttttactgacttcatcactgtgttcagtgagttccaggacgtgagtttgaataaatggaaaaatgggaacctgaaaccctcancaaagtctgctgtgagcatgtgtctctgatctttcaagtactgctttggccactcttaagcttcgtgaaccttattttmcwsawrsrtaaatgggaggrgagtagtaatgacatctactatttattaatcacctgctgagcatcagrggctgtgatgagtgccttacaggtctcattttttcctcactggagccctataagataagtactgttttccccattttatagacaaagagactgaggttcagagaggcccagaaatcttaggcagccagtaaatgccagaaacagaagttgaagccaagtctgtttgatgccagagcctgggcccatcaccaccccctggactctgtgccctccgggagctgttgcaaagatgagagttatttttctgtgtggtgcctggcacacagtgccggtgtgcaaaatcaccaacgcttggattgtcgatgtaacatttgctcacggaaagctgacctcacccatgttgaagctccctttcctcatctgctgagtcaggatgcagatggggcggctttcagggactgctatacagacagagttctagaaggttgtgtggcccggaagcggtgctgtgccgatgttaggggcctctacctctgaactac

SEQ ID NO: 1491 - DNA, 697 bp, Homo sapiens
acagaagggggacagagtctcgttctgtcgccaggtaggagtgcagtggcgtgatctcgcctcaccgcaacctccgssggctgttcasmagcgattctcttgcctcagccgcctgagtagctgggactacaggtttcctgcaacctcactgggcattttcagaatgatctgtacaagcgttgactgaatgattgattccaagttcccccttcctaggatttcagacctcctcttgacaagtgatgaatgggccatcttaatcttgtttggatcagaaaggaccatacaactgagctttagacaagactaaaaataccaaaagtagcagtctgcaattttatgtgcatgtggcttgaagctctgacaacaacacaaaagattcccaaatgtggtactcattctacctggatataccagaggattttgtgggaataaaaggatgactgttttttcacttgaataattagatggagtctagctccgtcgtctaggctggagtgcagtggcgtgatctcagcttactgcaacctccgcctcccgggttcaagtgattctcctgcctcagcctcctgagtagctgggattacaggcacccaccactacacctggctaatttattgtattttcagtagagacagggtttcaccatgttggccgggctggtcttgaactcttgacgttgtgattcacccacctc

SEQ ID NO: 1492 - DNA, 978 bp, Homo sapiens
gcggcctacggctgcgagaagacgasrgrarggsaggattgttcggagatgccggatggcagccatgagaaagaccccactggtctgagaggtctgtgcaggaatgcacggagcctgggaaacacagagagctaagggcacgccagtgcacgcctaatgcaggcggggtgacacctgcacagttccatctgctgcttcacgacgtgttgctaactcagtcgccgaccactggactctgggctgctccattcctaacttccacagtgttgatggataccgatgcaagcccttctggggaagacacattgagagcctctctcagccatgcattcctcagcctgactgcaaggtcgcagccccctacaaagcccagtstgagtgcttcccaggctgccatgtgccaggtctccctcccacggctgtcctggaaggctctgctttgcaccaacttgccagcacttggcattagtcaaccctctagcttttaccaatctgatgggtgtaaagggaattcctgcgttttactttgcatttctctgattcctgtgggtttgagcagctcttcattgaattgtgtgtcatttgcacyttcccttctgggaattgtctgttggggttggctttctgtcaacttaaacaggagcaaacttggttacttttaattaaaagcaggctcgtggcagcaggggagttttacatgcataggaaggtcaggtccagccctgcccatcttcgtgcatactctctctttggtcactgctgtgcggcatggtgagcttggcacctggccttcaaaatgcagccacagaagggagttcatgggctaggcattctgctaagggacacagctgtctctggctcctgcatccaattactggactctctgcttcattgctctggtggagctgccagcctgagtctccacatgttctttcaacactcccttggtggccagcccagtgtgcttttaatcattga

SEQ ID NO: 1493 - DNA, 369 bp, Homo sapiens
acagagggggtagtctcawwkgryckwkygkmytwckgctgcgwgwwgmkwswrawgtsksmwttttcctttctaattgaactaatatagaatcttcttttcttgtctaatctagctaatgatctatgaatttagtttatcttttcaaaaaccaccttttttttcattgatcttttgcagtttcttttgtttcaatttcatttagttctgctctgatctttgttatttcttttatgctagctttgggtttaatctgttcttttttttttttttttraaacaaakyctmwttytgttscccaggragkgcaggggggcaatytaacttaattgaaccctttgcctccggggttaaagcaattttcctgcc

SEQ ID NO: 1494 - DNA, 905 bp, Homo sapiens
  misc_feature 258: n = A,T,C or G
gggaagatggcgaacgggacagttcctgaaagggaatgtgagatttggcaatcaggatagctgtagcctttactacggaaaagtcagtggtggagacagcagacagattcagcgggctgaagagtaagcagaaggtgaggatgggtaggcaggagatagaaaccattattttttgaagtttgatactaaagagaaggaaaggctaatacttgaagggggaagttttctaaatgggtgggacttgagcatgtttactancacaaggagagggaggtgagaggccgaacgtaagataggcaatagtgggtgaagcaaaggccgtggagaggcagacgaaacggactccagcgcaagccacgctgcaaatctctatgccaggcagtttgtgcctctgagctctgccatgccattcccttttcctggatgatctcttcaataaacctttactgagccactcctggggcagggattattctgcaactgtgctgcaaaggtaaacaacctgggctctcttctccagaactcatttccaacacttgaagagacaagtaagaaacttcaagtcagtgtggagagtgctgcaaggrccagtactggacatgatgggagacactggaaagtcccaaacctartttarggtgttaggggacttcctggaatcggggacatctaagctgagccctaaagtaggagacagtcagatgggagagagtaaagaagaagacatttcaggccaaatgcctgaataccataccctggagtggtcaggttggttctctggtgggaacacgaagattctcctgatcttctcctccctactctcaacactctcaacattcgtagtttttacctccactaaatactctttcctatattatagtgatgttacccctttatctactgga

SEQ ID NO: 1495 - DNA, 776 bp, Homo sapiens
agggaattttgaaaaatgtgtcaggcattccatcctttttactctgtatgaatttgatggcctcgttagccatcattgtcttttcaacacgttgaaacctccacattgctgaggctaatgtggttagagcacctgttctcagtggtccgtgaaccagcagtatcagcatcacctgagacctkgttagaaatgcaaattatcaagcccatttctagatctccttaatcagaaaatcagggtgcagggcccaggaatttcctttaataggccctccagatgactctgatgctcaacaaagtttgagaatcacttgtttagtcccaaacctgtgtttggatgccatttgcattacttagaagctaactggggactagttactttatctttggcctctttatttctatagaaagaggacaaccctctctacctattaaggtcatgatggggaattaaggtgacatgtataaacgttttgcacataagtgcttggtgaacaataactgctggtatttggtaccatcttttaaaagccatggtggtagacagtgagaagacaaaggcataaaaggtgggcccagccctaacaggtttgcagtcaagtagaggtggcttacatataaataattattagaccagaraaatggtaacgtttctcataaaacccaagccaaggatggtttcgcttgttttttttttctttcarcctgatagcaaatgtgatagttgaaagcagacactgatatgcctagaatcatgggattgacattacttttgct

SEQ ID NO: 1496 - DNA, 761 bp, Homo sapiens
acagaagggactttgtctttaatatacatattcttaattgtctctgattatggcctcaaaacatacagttttaaaataattttatgattttttcctacggaggtaaatgcctcattcataattttgaaatgtaaattaattttcttttcayatgakgtttkgatttcaatgtattagattttaatacatagaaaaattattttgtgtaagtacttgcttcaaaagaattaaaaatcaacatttataacttcaggtgaatgagatattcataattttttttggcctcactactcatctcctaaactacagtcccatttttcttactcttctttgtagcaaaacccctttaaataattgttcttatttctcccctcatattttatctgaagcccattttcatcaagcatttgctccaactatacccaaagcttctcttatcagcgtcactaattaccttcatgttctcaaattcattagtaaattctcaatcttcttcctgcttgatctatgagcaacacttgacagtattggttacttcatcctccctgtatccctggtcttcgggtactgtgctgtcttgctttgcccctaatttattagtcactccttgttaatctcctttgctgttttaccctgttatacctgctttcttaayattggagtgccccggggctcaacccatgatcctctctggcttccattcctcccttgtgacctatcagctctatatcgatgattctcaactctcagtttcagtcctg

SEQ ID NO: 1497 - DNA, 644 bp, Homo sapiens
ggtattttaagcctttattttgaaattgtggctgatactattttattacagataatgggcttgacattctaaaagtaatggagtgagattaccttcaaacctgtatagaaagtagtaaaaccttaaactgactctgttcttactaatctagggaataataatatcagtaattagtttcttagagttagcacatgtgagagtcatctgtaatgctttctgattctcacagtaactctatagtattacatatccctattttacagacaaagatagtcaagaagattaagttctttactgtgtcaggaaaagagacytcaaacccaagttcgagaattagaactttttctgttatatgttactgactcattaaagtttaaatgtccttaaaatttcytaagaattgccctaagtagatgattctcatctcaccttctaggtacactgatttcctctataatatttagaaacaggtacattttgttttgttttaattttaaaacatccgagatgggcatggagaaggcaaaatgattatttaaaaaaattttttttgtctgcattccattttgagtctgctaattttattttcttccatgtgatgtcaaataaatattcacaggtaagttattgcaataaattattgc

SEQ ID NO: 1498 - DNA, 546 bp, Homo sapiens; identical to SEQ ID NO: 171

SEQ ID NO: 1499 - DNA, 240 bp, Homo sapiens; identical to SEQ ID NO: 250

SEQ ID NO: 1500 - DNA, 725 bp, Homo sapiens
agggccctaactgctgaaggctagagtaaaactgatgggaggtgggtgggtattgaatggagtccgtggatttgsrgsywacrgswgckagmasarrswgasrrgggtcttcactgaaaacagaggatgaagtgaaagactgtacccagaatactgatggctagaagatttatggatccctctcakaaggcacttgttgaaagaaagatctgtataaaaatggacctttgaaaattctggtctaataacatcactctgagacttagcaacagtaacccttgcccacatatatagcctttacattcagctttcatgggacttgctgtcaaatgttgatagccaaggttcaacagacatttgaaaaaagtacctttaaaacggggacagataacagaaacattaagaaaactggagctaaaagggagaaactggagagaacagatggaagtttgacaacactaagacttacagagataaagaaaatagtgcatccatgaaataagactagaatgctggaaaaagaaacagacggagaaagaactcttagaaataaaaaatatataaagtaaataagcgatagaggggggaaaatgttaataagataggtagaaaataaggaaatctacctaaatacagatcaaacagaaaaagaagtaaaacagacaaggtatttagattattagtgtagaatatttgacatatactaaagggggatcaaaaggaag

SEQ ID NO: 1501 - DNA, 567 bp, Homo sapiens
  misc_feature 428: n = A,T,C or G
cgacagaaggggcagttcccctgcacacgctctcttgcctgctgccatgtgagacgtccctttgcccctcctycgtcttccgccatgattgcgaggcctccctagccatgtggagctgtaagtccatgaaacctatttcctttacaaattacccagtcctgggtatgtctttattggcagcatgagaacagactaatacgtgagcccacgctgctccaggccctgggattcagcaacagacgagaacaacccaaaatctatgttctcttgaacttacattctaattgggcggtggggaagatgtatatgaagttactacccacatgaagaattaactacatatgtaaagaatttctaatgttaggagaaaatgcttaagaaaacaggtttaattggccgggtgcggtggcttacgcctgtaatcccancactttgggaggccgaggcgggtggatcacaaggtcaggagattgagaccatcctggccaacatggtgaaaccccatctctactaaaaatacaaaaattagctgggtgtggtggtgggtgcctgtaatccccactactc

SEQ ID NO: 1502 - DNA, 466 bp, Homo sapiens; identical to SEQ ID NO: 199
  misc_feature 330, 365: n = A,T,C or G

SEQ ID NO: 1503 - DNA, 681 bp, Homo sapiens
tttggccgagcggcctacggstscrmgrskcgacagagggggtagcctatgctcggagggcacatgagcaagagcttgaccatctgtaccgttggttgacttgctctdttaagggctatgatttcaggtcgtcctgcgtgtttagaggaggcgagtggaatcttgagtctcggctggagaadgcagagcacgggcatgcagacctcaaagcctcaaacctgcgtgtgagaggagaagttggcgagctccagcgtatggtccacggagtcttgccctgttgcccaggctggagtacagtggcgcgatctcagctcacggcaacctccgccttccgtgttcaagggattcccctgcctcagcctcctagtagctggaattaaaggcacctaccaccacgcccgtctaatttttgtatttttagtagagatggggtttcaccatgttgcccaggctggtcttgaactcctgacctcaagtgatctccctgcctcagtctctcaaagtgctggaattacaggcatgagccaccacgcccagccaactctcaccacttctatttgatacatgctggaggttctagccagggcaactaggcaaataaatgaaataagagacatccatatggaaatgaagaagtacaatgaagaagtaaagctatacttgcagatatgattttatata

SEQ ID NO: 1504 - DNA, 606 bp, Homo sapiens; identical to SEQ ID NO: 494

SEQ ID NO: 1505 - DNA, 706 bp, Homo sapiens
  misc_feature 596: n = A,T,C or G
ggttaaaatggaggcattgttgcatttgattgaggggaggagggggatttggtgctgcggagatcctgggcatttgagctcatcgtgtccaggcggctgtgcctggtcctcaccctgcccatctgaccagggttcccttctccttgcagctgcggccccatcaatgtgaaaactgaacccatggaagattctggtgggtaccaagatgcttttagaatcaagtatcggccaagcgtggtagctcacgcctgtaatcccagcaatttgggaggccgaggcaggcggatcacttgaggtcaggagttcaagaccagcctggccaacatggtgaaaccccgtctctcctaaaaatacaaaaattakccaggcgwggctgtgcgtgcctgtaatcccagctaccagggaggctgaggcaggagaattgctwggacctgggaggctgaggctgcagtgagctgagatggcgccactgcactccagcctgggtgacagagcaagaccctgtctcaaaaaaacaaacaaggctgcgcacggtggatcacgcttgtaatcccagcactttgggaggctgaggcggacagatcgcctgagctcangagttcaagaccatcctggccaacatagtaaaaccctgtctctactaaaatacaaaaaattagctgggcatgttcgtgtgcgcctgtagtcccagctacttgggaggctg

SEQ ID NO: 1506 - DNA, 741 bp, Homo sapiens
gggagctgaggagccgttaaaatgctagggaaccacctcctgagattctgaatcaattgatctgaggtagagcccaggcatctgtattttaaaagccaaactaaaacaaacttaagcgattctgaagagcacccgttttggagaaccactggaggtggaaaaaggtaaagttatctttttcttttcctttttattttggagaggtgtggtagggagaggaaagataagaggaagaacaggatgttaaggttgtaaggagctgcagaaacttcaccttccttacaattttttcctctaagtcttctttggctgagaagctagaattcctctctttttgagaaccggaggcaaaatgagtatgttttgagtgtgcaggccttggaaaagagagagttcaaggtatgccagattcaagacttgtcaaactgtaggtaaggtttgttccataactctctcaaggaaaccttaaagagttgtcttccaagagccatgaaattataatttgatcagatctacttatacatctactcggtacccctaatagcaactatcacatagtacagcataatgtgataacgygttactaatcagttgggtgaagccattaataaaatcattctgcctctttctctttttgagaattcagctttgaattctgaaataatcattcatccaaacatctgaattcctcagacattatcccctctggacacatacaaccactagtgtagcacacaaatc

SEQ ID NO: 1507 - DNA, 457 bp, Homo sapiens
gcgmcacagtcacttttccagatctaggagcaccatggacacctcgtcagagatgctggtacggtttggacggcgctgtggacgggcgaaggaaagtacagtcttaggtatgtctttatcagcagtgtgaaaacggactaatacagtaaattggtaccagcagagtggggcattgctgaaaagataactgaaaatgtggaagcgactttggcactgggtaacaggcagagattggaacagtttgaagagctcagaagaagacaggaaaatgtgggaaagtttggaacttcctagagacttgttgaatgcctttgaccaaaatgctgatagcgacatggacaataaaatgcaggctgagatggtctcagatggagatgaggaactttctggaaactggagtaaaggtgattcttgctatgttttagcaaaaagactagcgtcattttacctctgccct

SEQ ID NO: 1508 - DNA, 617 bp, Homo sapiens; identical to SEQ ID NO: 789

SEQ ID NO: 1509 - DNA, 786 bp, Homo sapiens
gcatgcgtatcattttacatgtacaaaatgttcctggaagcgtagtttgtattagcaaaaactggaaacaaatatccatcaacagtaagcacatattgcactatattcatataatggaatactgtactgcaatagagagcaaaccacggtgcatgtatcaacaggagtgaaatagtattgaatgaaataagacaaaagcacatatagtgtaatttatttaatgttccaaaaaaccttaggcctamrscyrmrasatasamgamwgmasksatgtatagtaaaacgaaaaagacagaaggattgccatgtaagttagattaatcattacttgtaggagggaggaaagatgtatggtttgaaagggacatttgggagtggctatacttgcttctaatattcgattttgtaatctgtaagtttgcaattgaagttatacacttgggatttagagtaggattgtcccttggagatataaagttaaatacaaatataaatcatcagctctgagatgcatttatagccaaggaaattcatgataccatgtaatgaaatgataacgaagagaagggcctacgacgagttctgaggagcactgaaaggttctatgttggagggaaaatctgcaaaggaaatagagacgaatattgaatgaagtaggaaagtctgtgtctctcaggagaattcttccaagcataagaagtaggcacctgtgtgaagtgcttcagagtaaaatgaggatagatgagtaggcaatcttgacaagggttatttccgaatgatggggac

SEQ ID NO: 1510 - DNA, 620 bp, Homo sapiens
  misc_feature 3, 4, 5, 6, 7, 8, 9, 10, 11, 12, 13, 14, 15, 524: n = A,T,C or G
agnnnnnnnnnnnnntatgattagtagtgaatatgaaagaatttttactggtactgaatgcaagagtgagtcttaaactaaaatagtaactgttgttttccggtatttcaggtggaaatgcttaaagaatgtgtctagrsakaagaskattgactggactacatgatttttataatctctactaaaattctgtaacttaacagttttgtgctccatagcttgtaatattatggttccagcatgcttccactgcatggctctgctgaccataacttgtgactttataaacaagatttatgttagttaaaagtagaaggctgggtgcaatgactcatgcctgtaatcccagcactttgggaggccgaggcaggcagatcacctgagatcaggagttcgagaccagcctggccaacctggtgaaaccccgtctctactaaaaatacaaaaattagctgggtgtggtggcacacacctgtaatcccagctactcaggatgctgaggcaggagaatcgtttgaacctangaggcagaggttgcagtgagccgagattgcaccactgtactccagcctggttgacacaatgagactccgtctggaaaaaaaaaaaaaaaaccaaaa

SEQ ID NO: 1511 - DNA, 567 bp, Homo sapiens
cgacagagggtttctgaaactgtttatcaaaatttagcacagttccatttcctactggctccagacctctttgacctggtccctatgtgctgctgaagaattcttaaagagaagccttggcttgggaaaacatgaaaatgagaagggacacacagagagcccaaacttgtgactgtcgctcagacccaagccccttgcaaatggacatggctgagtttgggctgatcattagcgcttgggaatgatgtgaaactaaggtctatgacgggccacatgcacacagaaaccctcaacgccatgacagtcccagagtggtctcccaaaacatctaggcatccactatatctacaagaatgtggctgggcacgatggctcatgctggtaatcccagcgctttgggaggccgaggtgggtggatcacttgaggtcaggagttcgagaccagcatggccaacatggtgaaatcccatctctactaaaaaaataaaaacttcgtcgtgcatggtggcacatgcctgtaatcccagctacttgggaagctgaggcaggagaatcacttgaacccgg

SEQ ID NO: 1512 - DNA, 1030 bp, Homo sapiens
gggcttgaggggatggatacccaattttccatgatgtgattattgcgcattgcatggctgtaccaaaatatctcatgtaccccataattatatacacctactatgtacccacaaaaaatttttaaaaaggaatgaaataaaaacatttgagtttaagaaaaccacaaaaaaacaaagtagggaaagctcttcaaatactatgaaattgagaagacaactaaagaaaatattaataaagacaagaacataaataatttctttggcagaacataagccatcataatcagaagataaataagctgggaaaaatatttgtaactcatatcctagataacatactsattttccctgtatataaaaagtttctctaatgtgataaataaaaacacaataaaccagtaaaaaatgactactttgatatgaaggtatgaattcacaattcctagaaaatagaaatagctcttaaacatgtggaaagatgtgaaatcaaaatcataataagagaaatgtaaattaaaattactttgagttttattttactcacaatttcaaagaccaaaaagtttgagagtatactgtgtgagagacaatgtggaaccaagttctttcactcatttctggtgggagtagagattgatacagccctcatggaaggcaatttgcaacatataaaaatttataaaatctagggccagggacgttggctcatgcctgtaatcctagcactttgggaagccgaggtgggcagatcayttgaggtaagtgggtcgagactagcctggccaacatggcgaaatcccgtctctcttaaaaatagaaaaattagcctgatgtggtggcatgtgcctataatcccagctactcaagargccgaggcaggggaatctcttgaaccccggaggtggaggttgcagtgagctgagatcatgccactgcactccagcctgggggacagagtgagactctgtctcaaacaaacaaacaaaaaatttataaaatctgatactttttcaccatggagtttcttctg

SEQ ID NO: 1513 - DNA, 706 bp, Homo sapiens
tttacaaaagtaactcaagacattgaaatagacgaaaacagaaacacataaagctaagtagtgaaagttctttttaacagttttattgagatatcaacatataaaaattgtatgtatttacggtatacaactgtgatgtgtttgatatatgtatacattgtgaaataatcaccacatgaaagctaactaacatatccattacctccgcatagttacatttgtgtgcatgtgtgcatggggttgagtagggagatttaatttaggacttgtcctcttagcaaattacaagcatgtaatacaacattgttaactatcatcaccatgcagtgagtgcattagagctccagtaattattcgtcttgcataactggaactttctaccatttgaccagcatcagcccattttcaccttttcgacaatcccattccacccaatctctaccctcaaacagtctccattaatttggcatgtatatttctaggtttttttctatatacatatgtacagctatattatatatgactttacaaaaatgagattacttttgtatcagtaggattatttgatttgcaagcaatagaaataaactctggctgacttaaggctgaaaaggaatttattggaaggatatgaggtaggtaaagagctgaagaactgagcgggaaaacatgaagagccacgctggtaaagcaacttccatgacac

SEQ ID NO: 1514 - DNA, 677 bp, Homo sapiens
ctacttttctgtagttggaagttagaaacatttgattcttagtagtacccgtgttaaattttttgggggggcctacaaagtaatagtttatatgttttctattagtaatttcctttgcactatgctttattttaatcaagtttggaattgagtcaaagtcacatcataagcatactggaaaacctataagaaattgtcagctgccatagattgtctcatatccctcactgaggatttgctttcattcttckgatactccaaaccacttttaaaaagctttcccagtcttggaatgccttcttaaaagtgttcagtgtcacttaaaaatatatatacaaatgattcttatactaactgcaagcttttttatcacatttggaaggctgttttcttgtaatacagagagaaaaagaaggcagagggctcctttttagraaattaatagtggtgttttcctccctttttctcatatactatctctaaagtcttcagacatttattttggccgggcacagtggctcatacctgtaatcccacaacttgggaagctgaggcaggaggatcatctgaggtcagaagttcgagaccagcctggccaacatagtgaaatcccatctttactaaaaatataaaaattagccaggcatgggggcaggcacctgtagtcctagctactc

SEQ ID NO: 1515 - DNA, 688 bp, Homo sapiens
gggacaaactgaactgacaagagaaagattaccagggtcaaaaggtttattacgaatgcacatggatgcctcgaagaaaatatgcaaagatccaagaattaatacactttttttttttcaaagattcaggtacagactggaatatataccattttaacaaagagtgataagttgtagagtagtgacaagacaaaggaaaaaggtttgggcttctaaaaacaataaaattgtgggaaggtaaatatatgcaraaaactaatggaatgtaatggttatttastaaggattgtaraggaaactgttcctgcatctgctgtttctcrattgcctttagctcaaaataatctgcatgccaataatatattgtggggtgacatacctgatctccttcactagattgtatgctgctttgcaacaatatatacagaacctcacttttttacattctctctactatttggtattttcagacttaatctttttcccatcaagtaggtataaaatgatatcttgaagattttcattctccttatgattagtgaaatcaagcatctctttgtcaaagcacaaaaccagaaaattagaaaatattactaaaagttacttcatgtaaatatataaaaatacagttacttcaaattgcggtatagattcattgcagctctaataaaaatcctaacagttttta

SEQ ID NO: 1516 - DNA, 664 bp, Homo sapiens
ggggtttgttaacttataaagcattggaaacctttttatacttttaaattagtgactaaaaatcctgtcccaccccttgggaccccagcagaggtcacckggaaggctaaatccctgccctctgtatcctctagcaatcctccctgaaatgattttactctttttaatatgatggatgtctttgattcaaaggaatatttgagaaaaatgaagcctctgtcagataaaagtacttatacacaggagtttctgattggggaagtaggtatgtatgtatgtatttatttatttattgagacggagtcttgctcttgttgcccaggctggagtacaatggcatgatctcggctcactgcaacctctgcctcccaggttcaagtgattctcctgccttaacctccgaagtagctgggattacaggcacccaccttcatgcctgactgattttttgtatttttagtrgagacrgggttttaccatgttggccaggctggtctcgaactcctgaccttgggtgatccrcctccctcgggctcccaaagtgctgggattacaggcatgagccaccacacccggctggaagtttgttttttggacaagccatagtttttgtcctccaggatatatcactgtctactttttaaagctctgtttatttgaatac

SEQ ID NO: 1517 - DNA, 910 bp, Homo sapiens
ggtagcttttcacaggcttgatcgtagcgcactgcagccttgagctcctggactcaagtgatcctcctgcttcagcacctccccgagtaagtggtactataggtacttcaggttttgaagcatgtgtaaaaaatactctagcagggacatcatttgagctgagcaggccatggaggcatcaaatgattagcagtagggtacaacttgttgtgagaaccagaaaagagccttggcctacataacatcctgtgctaaagaaagaaccctgactcccagcctgtgagtgttccagagatgggcagagcagtccctgcagcgcttcaaggaasrgggaagagcagctaacccctgatgcttctgtaagcactttgggacgccctttgctatagtagggtattgtcttarttatccctgacttgcctggtgttactttacgtcccttaatcctttcatgaagactggcaaacacattcagtcctgccaaccttgaaagtaggccatgtttgaaagaacattggcacaaacgagttgcgaacatcttctttaccatattcatgttctttaccgtattatgargacactgtgcttgccacatgggcagtcttgttttggggatacgtggttggatggacggttgggtggatggaagactcctggagtgtgaagtatctcaaggatgtgtgtccattgcatgaatgtatgtttgatctatgcagctaattgacaaagatccaccatcctgcaccctccatgttttatttttgccctgccattgttctcttcgacattctataatcatcaaggttttcttgccctcacctaggtcttgactaaacatgttgggtaaatgaatttcatattactactttcttgcgccgtcagccattgtgttcttggggactccatcctg

SEQ ID NO: 1518 - DNA, 661 bp, Homo sapiens
gctgtaaaatctgtaaaatgaagacagtaatacaaccacagagagtggtttgtgatgaatgtatgagataatttgtgcaaaactcttgaatctgttgggcacagagtaaatatttgaggaatgttaactgttattattattattacttttattggccagggaaacattttggaaggagatgaatgcttgatctgaatcctaaaagaatgcagaaagaagatgaaaggagtctctttgtaaagtgcattgctagtcagtccaatgtttaaaagccaccaacatttcaaatgggaaatacttttatgcatgtttcaaagatgaggcaacagactcaaagaagttaaactttcccagaaaaccaatctagcaaaaagtacaaatggaaatcaaaggtaaaagttttgatgccacttttgcatctataactctaaatagggctgcctgctccctccatttcctgttacctactaacaataagctgtgccttgccgggactattaaatcagtgcacctgcaaaagcagacgctgagcttttctctgcccactcaactaaaatgcctcgatttgttttgaatgcacactctttacaactggtaatggaggagcaagtaaaatgaactcaactcaattttattttaaataaatgctacagtgagttta

SEQ ID NO: 1519 - DNA, 756 bp, Homo sapiens
attacaatcatatcagcactaacaacagtgtcccaaaactacatacacgtgaaatttaacatgattgaggggatcaataggcaattcaacaataaaagcttttgttcataccctcttcttaawcagawgrkaagtcaattagatagagcatcattgaggttacaacatacttcagcaatgttgtcaaccaatttgacctgagatagatagatagacagttagacagacagacagacagacagagaaaacttcacccaacaacagaaatacaaattattttcaagcatacctggaacattctccaggatagagtatatgttaggctataaaactgtactcaataaatttaagattgaaaccatgtagagtatgttgtgtgaccatagaggaattagaaatcaacacagaaataaatttggaggtcacaagatatttggaaattaacacactttacagagcccattggtcaaaaatatatatattaaactagaaaggccgggggtggttgcttacacctgtaattccagcactttgggaggcgtgggtgggcacatcacttgaggccgggagttcaagaccaacctgggcaacatggcagaaccccatctctacaaaaaaatacaaaaaatgagttgagcatggtggtgcatgcctgtagtcccagctactcgggaggctgaggtaggggaatcgcctgagcccagcaggtggaagctgcattgagccaagattgcaccactgcataccagcctgggc

SEQ ID NO: 1520 - DNA, 767 bp, Homo sapiens
ggacaggaggatttttgcagagcttccatccagttcataaacaaagcaattcaatacatgtcttcaagatttctaaaggcaatgacttaattctaagttccatgaaagcaggcattgtgtgaatttctcctgcatctgaaactggcctagcacaccgagtrrgtgcttgataaatgaatattatcgaataaacacataaaagcataatatgatgtagctgcagaaacagaggcaagcaccaaactctacgacaatacagagtaagaaaaagcacagagactaagtgtcatttatgtatcaacagagaagtataccagggaacattctatctcagagaaactagacttgtgatcaattaatagcttgtcaaactgccagtaaataatgaataatgaaggtgggatttgagctcaaattgaagtaggttcagattccatacactttacactcttccacattgcctttcctttcctttctcccatggacagggtagtttttattagcttcctacagacaaaagatacaacccccctagcttaaatcaggaagaattagatatcctgaacagaccaataacaagcagcaagattgaaatagtaatttaaaaattatcaacaaaaaaaagtccaggactagacagattcacagcagaattctaacagacattcaaagaagaattgttaccaatcatattgacactatttcaccagatagagaaagggggaaccctccctaaatcattctatgaaaccagtattgccctaata

SEQ ID NO: 1521 - DNA, 679 bp, Homo sapiens
ggtacccacagtcttactcctcctttgctcaggcagctctatgaaggcctcctcagtgctgcatatgtgccctacgttcctgtattgtccaccgcaccatgccctgccttccagccaccccacctgctccttccttgccagctccacctgrcactgactctcttgactctttgtggctcaaccttctgattctccctattcagctgggagacattccccacaacagtgacacctgtatacttcaattaaggccactttgcacatactgagtaaacactccctaaattgggctaagaagaatgcacaaagtcacaaagtcctccaaactatgtgttagttacaaagagaataatattaactttacagtggagaaatccagcagacaccacctgtgttagtttcttatgactgctataacaaagtaccayaagctaggtggcttaaaacaacaaaaaatttttgtcttattctggaggctaagtctgaaatgaaaatgtcagcagaggccgggtgtggtggctcacacctgtaatcccagcactttggcaggccaaggcaggtggatcacctgaggtcaggagttgagaccagcctggccaacattcggtgaaaccctgtctttactaaaaatacaaaaattagccgggtatggtggtgtactcctgtagtcccagctact

SEQ ID NO: 1522 - DNA, 1188 bp, Homo sapiens
  misc_feature 574: n = A,T,C or G
gcaaggaaaccaggaatgtgataatgcctggggctgggagattatggaaattgtcagtcacccaaaactgactctaaataggcctccatgttgaatttagtagtcaaagacttcaaagcacctattgtagatatgctcaaccaaagggcattaaaagaattaaaggaaaaattgtcttaatgaatgagtagatagggaatctcaacagagaaattacattattaaaaaaatggaaattccagagctgaacaagtacaataattgaaataacaaacttgctaaacagtctcaatagcatattggagatggcagaagcaagaataagtgaaattgacaatagatttttaaaaatggcccaatcttaagaatagaaagaaaaaaatacccacaaaaaacactatcaaggagtccagcacacaaaatccaagctctgcctgtgcattaggcttcaggacatgagggaatggcagtgaattagggctgcactatgccaggaacactcatttaccacaactggatttgtcagcagttcgagtgaactttccttaggcattatagaattaactgtacttanagagaggttcttggttaacctcagtgttttcacattttaaattatttcctaagtttcaagtgaaactaaatatcatttgaaagacttttaaaggcagtctgcccaccccactccaactcaccccaatttccactaacaactacttcaaatgtaattgtcagaaagagcaccccactccactgcaccccaaatcagcctccgatagatattgcatctgaccctggggggcccttcccgctttcctcttgctatgctcactacactttatttccctcaatgaaaactccttccccaccctcctaatgtgtgacttcacattctatacatagaatttcttttttttccaaagtgaatatagttttatatattttttaactacataaaaataaaacacactcaatacaaaaagaaatggataaaacgcaaatgtgaaaacaaactcaccaatcaccaaccactcagaactttaggtcagtttaataggtgtcctcttctgacatttcagtgtccagtctgccctccttatccatggggtctgcatccacagatttatccaaccatggatagaatatgtgttttaaaaagcaaaaaaaaaaaaaaaaaaaaaaaaaaaa

SEQ ID NO: 1523 - DNA, 593 bp, Homo sapiens
gatctgtgttggcgtgcagggagcaggcagcgtctgcaaagtagcgctggcaaccacaacagagaggccagcaacaggaggagcaggaggagcccaatgaagcgtgctgtggaggacaaagagcagcagaggcaggaagcagtgacaaggagtgagctgggaaattccagctgccctcctgtcctacttacaaggaatagcctggaacaagtacagttgactctgaacaagtcaggtttgaactgcatgggtccactcatatgaagatttctttcaacgaaagctaccccgagtgtgcctgcctttcctgcctccccttccacctcctgcacctctaccatccctgccacccctaagacagcaaggccagtctcttctctctccccctcctccttcagcctattcaacttgaagatgacaaggatgaagagctttatgatgatctacttccccttaatgaacagtaaatatattttttcttccttacaattttcttaatagcattttcttttctctagcttaccttattgtaagaatacagtgtataatacataaaacatacaaaatatgtgttaataaactgtttatgttat

SEQ ID NO: 1524 - DNA, 870 bp, Homo sapiens
gggtccaaagtaggagatcattgttacccagaggaaggaaaacttgaagctggatgtggaaaactgatgatgaggttgccttttgccttgaagccatttgggtttttataagtcacttagtgtagacagtctcacctagcatcttccagttggggaaaaaaatgagaaggatctgattagaaaatggaagaacacatacatacttttgaaactcattttctccaatttgtcatgtcatgtaataaaacctggaaattactttttcaaaaatatgtcataattatatgaaaaggcaagaaacaactacactttgaaaacacaacacagtcctgggactacaggmmtrygsctscrwgcmmgrckacagttwkgkatttttggtagagycggggttagcttccctagctgcggagggtttctagagaaaagcagcacagttatccgtagccggtccagtataaaggcactcgcattagtggcaggttcctgagagctacatttgtcagcaagagtttcatggaggagaaagggcgaaggctgagatcctggtaggtggaggcaagcagggactgaggaccttcatgacaggtggatggaagagagggaaggccccctgatgggaacagggacacacggccaggaggaatggaggggaggttaggaagagacctctcttctacctcttctttcctcactgtttctaaaaacttaatagctttggtttgacagatgaataaataaggatgtaaatgaggttattttaaatgaaaagtaaagacatgctggtaattatgtaaaataaagataagtcaaaaattacttacaagttttcatgctgtatgtttaggcatagatctaaggtagggtttg

SEQ ID NO: 1525 - DNA, 567 bp, Homo sapiens
gggatgtggctgcggcatcgccggcctcgctatgtctgccattttcaattttcagagtctattgactgtaatcttgctgcttatakskrcctskgctkmkakwmgacgwcswkggsryssmksckscwksrcmgrmmtmrmwmtggattgttgggtatattttggaagtgtgccagaattgatcagtgagttgccygacatttcttctcattgtgatggcagaagttctagatggcaagccagattgtgatctgatgccatcaaaagtcacaagaactggccgggcaaggtggctcacgcctgtaatcccagcactttgggaggtcaaggctggcggatcacgaggtcaggagattgagaccatcctggctaacacagtgaaaccacgtctctactaaaaatacaaaaaattatccaggcatggtggcggtcgcctgtaatcccagctactcgggaggctgatgcaggagaatggcgtgaacccgggaggcgaaacttgccgtgagccgagatcacgccactgcactccagcctgggcgacagaatgagactctgtctcaaaaaaaa

SEQ ID NO: 1526 - DNA, 830 bp, Homo sapiens
ctaaagtgatagtaagctgtgctggtggaagtgaagatgtagaatgttctagaggtgactaacattttaagctaaagattgttggcaaatagaagatgaaagaataggaaataattccaagatcttcaactcttctgcattacaatakgtaaccaaatgatcttaattgtctagtcaaccaaagtttacaaaaaataaattctgccataactgtgaytcaaatatatgcgaatgcataaaatatgggtaagaaagtgaatttgaggcttgaacacaggtaattaagargatcttataagaattgccaagacttgatggctaaggactcaggtttagaatataataaggaaaggtcttctgcttctggctatgacagagttgctagaatcagatgaattcatccactgagaataactataaaacttgagaacaactataaaacttggacaaaatacaaagcaaaacaaaacaaaatctgaaagctctgtagaacaaccagtgcagccaggacctcagggaccaagatcctggagagaaggaaaacatattgaagtgagtactgctctgagtacagctatttcgccttggaatgtttgctgattcaaggcttggggcatagaggcataaaaaatgacgcattcttgarcctgtggcagttgtactgggctgaggaaaccaaaaatggagttcagagttaaattaagcagttattacatgaggggccaagatctagagaaaagtactatggacagctaaaaccaatattctatgtgcatttttccttcaaggcattttctgatatccaacaggctaaactcaagacaagacac

SEQ ID NO: 1527 - DNA, 610 bp, Homo sapiens
cgacagaagggctcaggcaaaattggagctaaaattcacactgtcaatgtggcataaaaacaaccaagccaaaagttaacttaaactaatcaagatwsrkagkrtccccacggctcakcaagagctcatgcaagtcctctttggaggaatgcacgttacatacaagccttaagaaatttcaacttataatgtttgataataagggatatgagctcacaatcagaattacttaacacatgagaaaaataagccacttggggtcagtaaacaacaaaatcaattctaccaataacagcagcaataataataaaaacagctaacacttgtataggttactctgtagtgtgctagatacttgtcttaagaaatttatatttatggaagcatttaatcttcaaaataatccagtgagtaacaattactttatctttatttgccaaatgagcaaagtaaagcacrgcatcttcagattttagaatgattagattcacatagaatctaaaacatatgtgtgtaatacatttgaggaaataaatgtcattaaaatcatgtctcaaaatgacccagcatatttgaaagactcaaagagaacttgtagaaatgaaaaata

SEQ ID NO: 1528 - DNA, 714 bp, Homo sapiens
cgacagaggggatttctgtgcatctggagatatagttaccacttcgtatttttaaatttacttttattggggcaggccttttcttttttttagaatgtaactgtagtatatgttgggtagggtcttttggcttttcttctaggtgtgttcagtgctaaagacagtattgtttccttggacataaatagtcttagtgcggtggctttctcaaatgccagttttagtagcagcaacctcctgagtagccagggtggtataggcaatgattgtaagaagcttatcttgttcccaagtgctctatagttgtgtaagcaaatgctgtaatggactgtgcactccaccctctaggccagtaagtaggtgacacttgcaggtaagacccatctgcagtggtagcagtttacaataattgaggaggtgagaattcttcctaactcattctatgaagccagtatcatgctgataccaaaaacatataaggacacaagaaaaagagaaaactacagataaacatccctgattaacatacatgcaaaaatcctaggcagtgtactagcaagccagatcaaacagcacatcaaaaagatagtacagcatcatcaagtgggttttataccacatatacaaggatggtttaccatatgtgaaccaattaatgggcttcatcacataaacataattaaggaaaaaaacatgatcacctcaatagatgca

SEQ ID NO: 1529 - DNA, 467 bp, Homo sapiens
agattttgcctytrykgytgmraagggtwwsaswcwgtcassrrggcttagtgcagtgacacaattacagctgattgcagccttgaccttcccagctcaagtgatcctcctacctcagcctcccaagtagttaggaccacaggtgtgcacctcatatccagataatttttttcaatttttttttgtagaggtggggggtctccctatgttgcccaggcagatctcagactcctgggctcaagcgatcctcacacctcagcgtcccaaagtgctgggattacagttgtgagccactgtgcctggcctttttttttttttaaaccttttggttaaacttcttttttcactggatccaaatccttttacgggcttgcacatttattagaaaaggaggttggaggtaacaacaaaaactttcactattttttgttttgacaaaaggaaaaaggaggagttttttttaaaat

SEQ ID NO: 1530 - DNA, 1031 bp, Homo sapiens
acagaggggtttttgagtgcctgatgaacatccccataatttcagcttcaactagtgcattgaactaatctttacttttcttaccatgatacagtctcagaaaattgtaacatctgcagaaagcaaatgcataaagaatgtatgtatgcaccctacaaacaggtcataaaatgtacttttttagctaccatgatgtatttggagtcaaaagaattctacctgtcactctacttgttagttatgtgactctaaacagattactcaagcctggtttgttcagactataggctgggatcataatacttgcagagctacactgaaattgaaaagtccatattagccaggtgtggtggctcacacctgtaatctcagcactttcagaggcctccacaggagaatcactggagcccaggagttggaggctgcagtaagctataattgcaccactgcactctagcctggccaacagagcaagaccctgtctcataaaaataaaacaaaagtaccagttakrkatccttattcaaaatgcctaggacaccagaagtgtttcagattttgaatttattcagattttggaatatttgcatttcccagttgagcattcctaatcaaaattcaaaatgctgcaatggcatttcctttgagggtcatgttggtgctcaaaaagttttggattctagaacattttaaattttggatcatcagattagggatgctccgcctgtatatcattccaacttgcagttactggtacatattgtgggctccttatatgcccccttttttcttcttttttggggtcagaacatttaagctgaaagggaataagagtagtctaacccagccgggcgtggtggctcacacctgtaatcccagcactttgggaagccaaggcaggcagatcacctgaggtcaggagttcaagaatagcctggccaacatggtgaaaccccgtctctactaaaaatacaaaaaattagctggacatggtggtgggcacctgtaatctcagctactcaaggaggctg

SEQ ID NO: 1531 - DNA, 732 bp, Homo sapiens
ggagtttcttttggattctttggactgctcccttaccacttacagagcctggtgtgagagggagcttgcctacgcctgtgtgagggaaacggatttctaagctcctgttgttgatgtgtgctgccaaatggtgcagatctgcaggagacggcactttattatttgttagcgagttgtggttattcaaagatagacccagatcttagttagtggagggamwgargrskgwagytsctctgasacgaaaacttccagaggaacaaccaggcagcaacatttgctgttcaccaatatccactgttctgcagcctccactgctgatacctaggcaaacaaggtctggagtggacctccagcaaactccaacagacctgcagctgagagtcctgactgttagaaggaaaactaacaaacagaaaggacacccacaccaaaaccccatctgtgcatcaccatcatcaaagaccaaaggtagataaaaccacaaagactgggaaaaaacagagcagaaaaactggaaactctaaaaatcagagtgcccctcctcctccaaaggaacgtagctcctcaccagcaacggaacaaagctggatggagaattactttgacgagttgacagaagaaggattcagatgatcaaactactccaagctaaaagaggaagttcgaacccatggcaaagaagttaaaaaccttgaaagaaaattagatgaatggctaactagaataacc

SEQ ID NO: 1532 - DNA, 589 bp, Homo sapiens; identical to SEQ ID NO: 227

SEQ ID NO: 1533 - DNA, 797 bp, Homo sapiens
ttggggaccagggtatgcctcccatgcatgttgtcttctaacagcttgtgttgactcctaactaagctggctgatttcattacaaccagctcacaccttggttgcagtgatttctgtggccttatttatataaccatatatctcatcactctttatattgtgtatttaagtaccactccttttttaaaactaaaaatctaacagcatttattctccagaagaccaaccaasykgyyyaykkcyrykaraaracgacagaaggggactagcaaaaatgttttatgccagaaatagttttaaccatactgacagcaactaaaaccaagaaagacgaggtgtaaagtggggtgagggatggtaagcatttgttgggtttctgatatgttccagccaccatactaggtgctttatgaatgtgatctggcatatcttcatccacacacttttaggaagctgttagtgatgttcattttgtaccatcacaaggaaacggaagcttggagaggctaggctctgcctgtggttccccacagtcaggaactaaccagaaggcgggagacttgagaccttggcaccaggctgtcctacctccccagccaggggattcattacaattaaatgacagctacttccccacctccattgtatacccaagcagtgctcagattaaatgggggactgkgaggaaaaatagaagccacttgatctttgcgtgtgtgctgatttacagatcaaagaaggttacaggaagttaggctaacacccttgttgcagtgatttctgtggccttatttata

SEQ ID NO: 1534 - DNA, 572 bp, Homo sapiens
agaagggatagccaactgaacaataggaaacagcatgaagagaaaaacccagccaacagtttgacagtcacctccaatgactcagacttgtgattagaaccatctgagaccctccagcccctgacatgctgctgggtgactgcacccacataactaatcccagatcacagcagcagaagaaccacccagctgagccaagccaacacagagactcttaaaaaatacactaacttattgttttcaaccataaagttttgtgtcatttgctatgcagatataagtaactgaaacagaaattggtaccagaagtgaaatgtacccacaacaaaatttaaaacatgtggcattggctttggaaccccttagtaagcagaggcttggggaaaagtgaagggactgtcggaggctaagagaagggtaactatgttatattgtgatagaaatattagcgaaagtgtcatgtgcagtaacttgaaagatagaaattatacctaatgaactcatagatctggctaaaggaatcacaaaacagaaatttgaaacgaccaattgattttgctagcagtgtctga

SEQ ID NO: 1535 - DNA, 585 bp, Homo sapiens
cagaagggaggtgcaaacattagacgatttcattttgggcttctgatacactcctgtccgagaagttacctttgaaaatgkgtactattttattgtcaattatgttttctttaaaaaaaatttatgacagattacttttgctaattatgtgtgtgggyagattatgttattcatgaattttatttcaggaccttggtaaggggttacacaatatttcttttgaaacgagggtctcgattattgggcttgagtatcctgatctaattaatgcactgggcagagctggcagacgtgtgggacacccagctattctctggaagggaagggggatataagagacacactataaaggtgaatggtaatcggcatctccccttcaaggggaccaggaggatctgagctgactgggtgcctttgtggaagtgtgttttgaactgagattagagagatcagcaatgtatctcttaaagtaatccaggaggagttcattttcaaccgattcagcagtggaacacttgaagaggaggaagtcaaaattcaaaatgggttgggtgcagtggctctctcctgtaatctcagcccttt

SEQ ID NO: 1536 - DNA, 566 bp, Homo sapiens
gtacggctgmrmkrwkwcrrsrgmwskkggaagagtctactgctcccaaatatctctgctacccactggccattgctttacattcctcaactaagctttcaccttttagtactaacctttgatgactgatcaaatrcaaatgccccaagaagactgaggataggagaaagaatatctctacctgtgaaacattgttagactgcctggctaggagttcattgttgttttctgaaggacgtaaccaaccactccaaaacttacaggcttaaaacaacaaacatgtatcatttcttatgattctgtgggttggctgggtggttcttctggctgaggcaggatggtctaggatagctacatccacatgtctggggtcccagctgagatgactggggctgttgaggcctttctccctgtggtgtcatcctccagaaggctgcccagatttgtccatatggtagcaggagtttcctcgaagcaagagagggcaagatccracacagaagcacttttcaagctctgtttccatcacatttgccaatgtctcactgatgarcacaagttccatg

SEQ ID NO: 1537 - DNA, 568 bp, Homo sapiens
cagaggccatcttctgcccttctggtggatttttctggtgcaagtgaggtcacagagaagggaggttttcagcctgacctgcttcccattctccagtcctgcgtgtgctgagaggtctctgtgtggtggcggtagcaggagcagtgcttcctgactcttatttccagcccctggattgcaggcacagctgtgagttttcagagccaacagcggtggcagcctcagaggtggtggcagcttccctggtgggtcagttctgcggtgtcccaggtatcagcccctccagtcctcccaaccatttcctgagcacttagtgacctgtgttcaatccttcctgttggatatacacaagcacatggcaagtgcttggctcakagctcagcatggagtaagtgctccataaattgttattgctataattcccacaagatcctgctctctatgagcccatggtctggttagagaggaaaagcgttcattaaaaaatastctgattggccagaagtggtagcttatgcctgtaatctcaacactttgggaagccgaggctggtggactgcttgagccc

SEQ ID NO: 1538 - DNA, 582 bp, Homo sapiens; identical to SEQ ID NO: 661

SEQ ID NO: 1539 - DNA, 629 bp, Homo sapiens
agaaggggcacatgttagtgtctacagagtgccacgtgggtagtgctaggtcttcsrggaggctcagccactgatgactttaaggcatgcaggtctccagcatggctgcaggaaaactaagagaacttgtttctagtagatctacccttaaagaatagctaaaggaacttctccaccagaaagaaaatggtaaaagcccaaagctgagattttcagagcagggagaacaggatgagtaaaaatagaagtaaacatactagactattctttatctcatgagcttctttcatcatatgaaagaaatggtgatgcagaagttataatgacatctgatggtgctggtcagtgcatgtggaagaaatacttaagataattgtattttaaaactggaggggatacagagatctaaatggaggtaaggtctctacacctcactggaagtggtaaaacattgacaccagtaagctgtgataagttacctatgtgtatggcaatacttagaacaacccctaaggaaactgtgtacaaagcagtgtactcagaaacattataagtaaatcaaaatgcaactctaagaaatgttcaaggccagttgcagtgactcatgcctgtaatcccagtgctctggg

SEQ ID NO: 1540 - DNA, 752 bp, Homo sapiens
tttgcccattttctcctttcctaattataattgatgaatgtaatgtataaaactcaaaaagaggctggtttattggcttatcagcactgactttgcagaaaggacaataaaaaacttgatgaagaagggcaaaagtggatcaaatggtgaagttatagacttgaaagatgtataaaatctatgattctaaaatatagtttcagaatgtttagatccttgtaaaaatatattctttccttttctttgtatattatggagtattcttgtgaggtggtggtcttcatgakagttgcacatcacaactaccattggatacatgtgcccaaatcctgctctgggaatttctacatctgtagctgtgggattgtgtctatgcacttatatgtcttgttctaaagagggttctggtatgtactgtgattgaaagacattcctgcaaggcagtgtttcatgaaagcatattctgtaggtcacctatgtcaaaatcacctggggtgttaaagtacaggtttctgtgccccatcctgaagcttttgaacctgaatttttgggcacaggtctcggaaatttgaatttttagtaacatctcacgctattatttgttgtaccaaagtttgagagccaccacattaagagagtatgaatctcaatctgtaattgggctgtgaactcaacttagtgtaggccacaacccgaatttaaaaagagaatgaaatagagaaaatatcagagtatgtcacatgtaataagga

SEQ ID NO: 1541 - DNA, 671 bp, Homo sapiens
  misc_feature 633: n = A,T,C or G
ttggccgagcggcctacggctgcgagaagagacagaggggccatttgaatcttctgtattcttgctatctttgcccctttgtcatctgtttgaccttgtaccaccagtttatacaactctaggggaattgtttacacagagctttgttctcaagtgastatgcatcaaaatcgcccatgaaatttttattttcatttgtttacttatttattttttagagacaaggtctcactttgttgcctaggctggagtgcaatgacacaatcatagctcactgtaacttcaaactcctgggctcaagcaatcttcctgcctcagcctcctgagtacctggaatgtaggtgtgtgccatcacgcccagacaacccccataaagtttttaaaatgcaaacacctgttacctacccccatgctgattcactgtctctgaggtgaggcctagaaaacagcatttgtaaaggccccatatgattataatgaacaatcaagatcaagaagccctattttgggtctggtgcggttgcttatgcctgtaatcacagtactttggtaggctgaggtggacatatcacttgagctcaggagtttgataccaggcaaaaccctgtctctacaaaaaaatacaaaaattanctgggtgtggtggtgtgtgcctgcagttccagctcctc

SEQ ID NO: 1542 - DNA, 569 bp, Homo sapiens
gggcaccgcgggaccagaaggcagtgacccacctggacccagctttcactgtcttgtgtgtgtctattatttctcaacctgccgatccacctaggagcagagagagagccccgttgcattgcaggctgctggccagatcccgcaatagctgctcaaacagaaggcaggttgtctgaatggagcatggtgaagagggaaggaaacagacttggcagtcattcacctgcagtgtccttgtcaagactcactaaatccgggaagcagctaagtggtccataaagggccgtctctggtaaaaggctggtttgttcacaggcttcttgtgtggctggtgtgaaacatcccttactctgtgctcttcctccatacccagaaagtgagccacagatgaacaaccatctcccaaatactcagtgcagaaagtggaggtccttgtaggatggcacgagcatttttgttcctgggaaggtaggtttctttatagcaatttatgaggtggaatttggtttacatttcagtctcttgaatctggtttctggtgcagtccctcatgggctagatcttctctg

SEQ ID NO: 1543 - DNA, 666 bp, Homo sapiens
ggaatcccacaagtatattatttacattttttgatatgttacattacattacattctgtcatgttgcatttcatcaccaatggacagratgttgcataacctcatatgacatgatgacaggtctcattcattctgtctctctcttcctctctccctctctcctctcacacgtgctctctctctccccctccctccgtccttccctctctccatctctgtgacacatgcacagacacacacacacacacaccacaaaaacgttcakatcargaggtgagtctaargaaatattttgaattttggcccctgtaaggatcctggaagccctccaatagtgacatttacaacttcaccaaagccatggtccttttatgacaataacaccaaattgccctgkacagagatgcataagcttactcaatatatattttgccagytgtttgtaattatttttaaatgtgtcattatgatgtacagtgaaccacaaaagcacatgttcggtaatgtaaaacaacaatatgtygcawattagcctcctttaaagaaatattcaaaamacaaattacaaagtttaaaaatacaccattggatgcatgtccctacattgctctgtgctcatttctgaaatgtggttggcagaaggacaataatttgtccttgttcttg

SEQ ID NO: 1544 - DNA, 644 bp, Homo sapiens
cagaagctggacaaagtccttgggcagccatcaccatggtgacgagctggagagagctggcccagaggagarggcagatgtctcagtctatctcccccaccccttctacccctctgtcctgtcttcctagctgcctctttccctctgctgtgctctccctgtgtccctaactagccctcttaggtcccctttcacttgttcccatctttttctgaaaaggggcaatagaaatgaacatgacttatcaaatttggaaagctggtaatagttttatacacacatgcacacacacacacacacacacatattcttcatctcctctcatcttttcctccctgtctctgtccctgcctatttctctggactgactgccctccctcttcttcatttctcacgctcttcattctctttcctcttcccagatctgtttcaggctatcgcctcctccctttgacaagacaggagtgatctgagctcccctcttgccatctgcaggaatgagatgcctgagtagcccaagaggatgcygccaaggggcacagcagagttcgccttgaagccacagactggaccttgaattccaacccatctgcctgatcagtcatcgatgctccccatgcctcagtttatcaataaaatgatgt

SEQ ID NO: 1545 - DNA, 500 bp, Homo sapiens
  misc_feature 398: n = A,T,C or G
acagaaggggtcataaaggaattcccatcatttcctcatgagacagtcacatcagggtgtgaccatggccttggtatcccccactatggatggagacacttaggtttagaaaagtcagtaagagacattaagtttcagagggcacagcggaaaccactttctttgtttattgattttgtttttctttatttgatttttatttttatttatttattaatttattttgagacagagtcttgctctgtgggccaggctggaatgcagtggcctgatcttggctcactgcaacctctgcctcccgggtttaagcgattctcctgtctcagcctcccgagtagctgggattacatgcatgagctactgtgcccagccttggtttttcttttgagacagggttntgctctgtcacccaggctggagtgcagtggtgtagtcatagctcactgcagcctcaaagtcctgagttcaagcaatcctcttgcctcagcctcccaacgtgc

SEQ ID NO: 1546 - DNA, 1008 bp, Homo sapiens
agacgacagaaggggtatgtgatttcaaatgtgtttcagacttctgatactcagtgtctttaccagaaaaatgaatttaaagtgaatctaataatacttgtcacatgatgatatagtaagaattaaaataatgcttataaagcactgaggacaataatgttcacagaacacgtgtccagtaaatggtagctatttctatgagtaatatttttattaatggtgtacatggtctcaaaactagttagtgtttgagcaagaatctgaacccaggtcagtcacacatgatagccataccattgacaatagcatggagaatactgatgacactataaggtctagttcagcagattaagacagccacaagctatagcttataatagtgcaatgaaagaggagcatcattgtaatccgagtgggcagaaaaattagttgagagaatatagckkatttcacaagcakagaaaatgaaagtatatatggattggagaggatgggtcggaaagattctagagtgaaggcagcacaaaagagaagcttgggggaaatttagtgcctccttctaaggatattcattagtccccctcttgtcttgaatataaacacttaagattttttcaatgtaagaaaaatgcaatgaaataatagctgcaaatacccactactaacaattgcttggccttcttatatagacctcccgaggttctcatcttttacatttcaggagtagaatcagttaaaaactaatctttatatgtaagggatgagagagagaaagaggagggtatgtgtgcgcacacatgtgtgtgtgtgtggtgggtagtaattttaattcaatgatttactagagttcgatgtcgtttgctgataaatgaagcacgaggaagaaccaggtttggaggggacgagagaatgagttccatttgtctcatatagaagttgaagtaactgagtgatgatgggtagagatgtccctcaggggtagccacagtattttatttactttttatt

SEQ ID NO: 1547 - DNA, 904 bp, Homo sapiens
  misc_feature 830: n = A,T,C or G
atatctaggaaaccacctatatgttacaaagaaagaatactkkyasgkcaygcrmgawgaswcagwmsskgtaatcctagcactttgggaggccgaggtgggcgaatctctcgagcccaggagttcgagaccagcctgggcaacagggtgaaaccctgtctttacaaaaaacacaaaaattagctgggtgtagtggcatacacctgtagtcccagctatttggaaggctgaggtgggaggatcgcttgagcccaggagacattgcagtgagcagagatctcactacactccagcctggacgagagagtaagactctttctcaaacaaaagaaagataaactttcacaatcagaaaatagaaaatacggcattcaagcaactgcctcattctcatcctaaacgatttcactgcactgtggacctacactaggttaaatacggttacaatttcaaaactgcagcagcagtcaaggccacccagctactccagagttcagcctcagcaggaagggtattcaaacccactcgcacactaggtctttagctctaagtacagtgtcagtttaaactccagttcttatatgttctggaggtcagaatttggaaatgcttatctttacgtagattatataatttactcaactaaatcttaagcacaaatagttttatactgtgatctacctcttgtctacctgctcttaaagctgggcagagggatgagtgaagagatcatgggaacaagtagccccaaatattaataacacctggaaaaggatccacaataaggggagtagagggtggtcaagggaagcccctgcctgactgcttanccaatgtttctttcctttcgctcactgaccataatcttgaggcagcacagaagtgaaaatctgcaaacgatgct

SEQ ID NO: 1548 - DNA, 528 bp, Homo sapiens
ccagggccacctgcatcgcggcccaacctgtctggggcctcgtcctctctcgtgtacacacaggagctcctggcaccccggagggyagcccccaaccctgaaacacacagcggcagcggcctgacctccccggcactctctacgtcatgtgtctcagatggggacctgtgagtcccggaacctgactcacgggtggtgtgtctctcgggaccaagtggatgttgagataccagccggacagctattataccaatgcagaaagaaggaaatggtggcttgggtactagtgccgggggacgggggagaggacatggttrcttgggccaaaggatggtgctgaagtggggagaaggggtctgattccagatggagtctcactctgtctccaaggctggagtgcagtggcacaacctcggctcactgcaacctccacctccctcattcaagtgattctcctgcctcagtctccccagtagctgggattacaggcgcatgccaccacgcccggatgatttttgtatttttagt

SEQ ID NO: 1549 - DNA, 595 bp, Homo sapiens
gtacggctgcgagaagagacagargggctttttcatcaggcatcctggagcccatgcaccttaaactttcccagcctctgctggccctgatcccttgtctctcaggacacagctcaaataccacctcctccagctcacctcacgcccaccatttggcaagtcctaagttcttgtcctgcatccaggaagaatgaggtatgcggacaactggagggtgaacaaggtggaaaggagctttattgagtgacagaacagctcttgggagacccaaagtgggtggctcctatctgcaggcaggtcatcccagtgaatgtccagctctcagtggagaggagacccagagtgggcagctcctattcgcagagtcatgtggaagcaccaggatcccattcctaccactgaaattaaacaaatgaaaaaaaattagcatgaaattctttgtgcgtggacagtgacctgagaagacaataagacatttcaaagcattgagttaaggataatgaagtttataaaatctagtggcaagatatagctgactcttgacacagacagaggaaaggccatgtgagacacagcaagaaagtgaccatctgca

SEQ ID NO: 1550 - DNA, 946 bp, Homo sapiens
gaggttcatttgcagaacagtttctgaatttgataggaagaaaaaagagcttctatgaagataggtggaaggcagacacataagtgtgtcaaaatgtgatcctttttaataaaaggtaagtgtgtatacttcttgattttttcaygacmkwmkgrtgtttcaagtagtgttcatgttcttttccaatattagagaaaatattatttaatcattaacatttagtaatttakgtaagacataggcccagggtttcttcataaagacacgaagatttattgccttttccccacagaataatggatagttgaatgtgtgtgtgtgtgtgtgtgtgkgttggggggtatgtgtatttatatatatatagtatatggattgattattcgtagtttgaatgcttggcttcttccaatcaatgagtacaaaatcagcttgaccatttgtgtaagtgacaaattagaatttataacaaaacccatatagctcagatatttaagttactaattctagcagacaatcaggcagtcaattattctaagtagttgaattggtttargktgttgagatataaccagaaattagtatgacaataaaggattactattcaagaagtcaagctcaagtgtggcaaaacagagcggacatggaaaatgagggggcagcaagagatcattggttttctaaaacataagaaagtcgctggaaggaaagggataaaatataatcttttctaaggtcagctctataagcaaaatttaaaagtcattcgtctttttcagtggtttttcaactttttggatttgtatcaccactaatggttatcacatatgatcggtcacagtataccaagatctcagacaactagagaaatggccttagtcctcatagaattcaaacagttactgagtctctatttgagaataactgattattccaaataagtacgttc

SEQ ID NO: 1551 - DNA, 548 bp, Homo sapiens
acagaggggccctttcctccttccaccatgtgagaatgcagcaagaaggtgccctgtatgaagcagagggccctcaccaggcaccgaatccggtggcaccttgatgttgaacttctcggccttcaraactgaagttttgtggccatggggatgctgacaaagattgcttgggatgcacacaaggcagcggcgaagcctgaggggtgctgccaggccgggctctccactggccacgagtcactcacagatcctacaccatgcaattgtatcattgcctcatggaaaagargacgctcttcaactttaacatgtttttgacacctgctaaacacctggtaatgctagctttctactcargtctcttctcagctctcttctcagctctacagattataaatctttaatgctgacaaaggagttatcctgctgctgccagaaagaagctacacaaattttgcgatgctgtgaggcaaggcacaaatctcagaactgtggaaaacagagaatctttcccttcttcagttgtgtcttcttgccacaacttccat

SEQ ID NO: 1552 - DNA, 691 bp, Homo sapiens
gggcacccactctattgctckscggattgctccaagggaagacagctgccatttgatgagctgcccacatgacagagaacaggccaatagccctcaaagaattgaaacctaccaaccaggggagtgagattggaagcatatattccttcgattaagagttcagatgagaagacagttcctgccaataccttgattgcaaccttatgagaaatcttgaggtggagacctagctaaaccatgcctagattcccgactcacagactgtgagataatatactaaaaatacatcactaatttagaataaaaatcaaacaagctgtcgaagaatgtgcacaaaagttgaaaaaatattacaccaaagatgatagacaaagcacggcaatccattctaagaaaagaggtatttgcaagggcaaatgagaacaaatggagccaaagcaataaattaagagaggaaaatttttgtaagctataaaaatgatctgagcttgtagtcaaaaggagtcaagatattgcatgcaacattgatgagtagagacccatgcttagaaatcatctgaaaaaaagtattttagaaataaagggagtaagcctgtaaatgttcaggaagaatacatggaattgatattttttaaaataactaaaattcattctcctccatacactggccacaaaaaagtgaagcaacttt

SEQ ID NO: 1553 - DNA, 601 bp, Homo sapiens
gcttgttgttttggccgagcggcctacggctgcgagaagagacagaggggccctttcctccttccaccatgtgagaatgcagcaagaaggtgccctgtatgaagcagagggccctcaccaggcaccgaatccggtggcaccttgatgttgaacttctcggccttcagaactgtgacacagagaatgagtggaatactaatacattgaagggcaaaatcaaaaccccagaagatctctaaaagtctgaatgaatcagcccatattacaagataaagtccataatggtaaacggaaggctctggtcttggtttacaaaatccaaccactcaaatatgtagttgctggaagttttgtggccatggggatgctgacaaagattgcttgggatgcacacaaggcagcggcgaagcctgaggggtgctgccaggccgggctctccactggccacggatctacgcakccctggagtctggcccctggttgtatctctggaagctggtcctggccttggagttgacctgaaactcytkcmmgcctcawswtttcaawykcytkgstcctyatyrygcagagctttgttcaaatacaaagctctccttcc

SEQ ID NO: 1554 - DNA, 465 bp, Homo sapiens
cctacggctgcgagrrgwgrcasaskkaggtgatcatggctgggtttgatcacatatttgggtattagctagttgtgggccaatctagggcggcttcatttaaaacaactgagctctgctctatgtggtctcttgtccttcagtaggtaagaccaggtttgttcatatggcagtgacagtttctaagagaatgagaagtgtgcaaatcccttgagacctagacttgaaaccagaagaacatcaaaaccaattaaaatccaaggagtgagaaaataaacatcacctcttggtgggagaagctgcaaagttatattgcaaaacatgtggatacatgaagaattgyggccatttttgaaaatgaatgatcacaggttttttttttttgasagatgaccttaaactttaaaatatggycttttattaaaatattaagtttttcacactacacctctttccttcccatat

SEQ ID NO: 1555 - DNA, 489 bp, Homo sapiens
  misc_feature 418: n = A,T,C or G
acagarggkgtgcacttgcgatcttgattgacacgagtggcacccttttgcaaaagtaaattgccttgctgaggaaactaaatatatgtttgagtgctgtttcttttgtggcatcggaaattcatttataacaattttggtggcccgtacacggagrgcccattctcctctggggaggggtctccagtactttcccgtgtggaggcgcgcccagtcaccttgttgcggtagcctcaaggtgaggaatcgagrcccaccaagtatgatgaataaacccagactctcagcaatgcaggaaaggaaacaaacgggcagcttgggaaaagggggctcacataccacagcgactaggtaaactctacacagaccaaggcatcacgtccagtggagtgcttgtcctgcaagagacagggctcangagctcgcacgttccacagcgcaccacacccaacctcagcccacctgggctctcccagccgcctacctctt

SEQ ID NO: 1556 - DNA, 594 bp, Homo sapiens
tacggctgcgagaagagacagaggggagttacttgatccacttccttacctcctgttcatgcaackkkgcttgttttgcttctactaaaatggttctaggtgctgtgtggacaggtgatacaaaagcctgactcacacggttgacattcattcattccattttcatttctctttgagtgatcctgacaagcagagggtctcaggtggatattactgtgtctttgagacctctctaatccttatctatctctcattttaatacagagagtttcatacgcagaccttaagtagacatagtatccagctaaaagggtctcactctgtcacccaggctggagtgcagtggcgcagtcatggctccctgtaacctcaacctctcagactccagcaatcctcctgcgacagcgaagttaatcttctggttcggttcacaaagtgcaggagagcctaccagcttgagagaaaaggagtcatgctgtatttgtttccttgagtgaatggccactcagctgctgtgtttctccctgcatgtggctgaagtttacattggagggtgacttcctgattgccagttagcatatgtgtccggctacc

SEQ ID NO: 1557 - DNA, 693 bp, Homo sapiens
ggattgcgccattgctctccagcctggggagcaaatgcaaaactccatttcaaaaaaaagaaaagaaaagaaataactgccaaaaccccaggctattattttgttacccaaagcataaccaatctaccaaagccatccaaaatgcttcaaaaggccgggcgcagtgactcacgcctataatcccagcacttarggaggccgagtcaggtgggtcacttgaggccrgaaattcaagactagcctggccaacatggtgaaactctgtctctaaaaatacaaaaattagctgggcgtagtagcccgtgcctgtagtcccagctacttggatgactgaggcacaagaattgcttgaagccaggaggcagagcttgcagtgagcagacattgtgccactgtactccagcctgggcaacacagcgagactctgtctaaaaaaaaaaaaagtgcttcaaaagcaaccgtataacaaaaacatactgaacataggatttctgccattcttgtctgcctataaggataracaaactatctcarataagtaactgaratatttattcaacggtattctcatccrgcataaaatacttttttcaatgtagtaacaaacttaccatcttttactttaagggttckgttattttkgattkgcaatcagagcaatagtaaattgagtgagaaagttctgagttttac

SEQ ID NO: 1558 - DNA, 698 bp, Homo sapiens
agaagggatctcttgtctttttgaatgttttctcttctctgtaaagctattggttgtagcattttactttttccaaatttttttaaksraacttttgaaatgtatagctgaaatgaaagaattttagcatgaatgctaatatacactcagcacctatattcttgctttttcatgtatttactcctgaattaatatattacttgttatatgcttttgaaagtaaactgcaaacaagtgcatgcttctcctagatctttccacatgctctgccattaattagagttcaatgttcaattttttccttttgatgtacaattaatacacaattaatttacacacacattttacttagttctgaaaaatgtatatacttttataactcaaagcccatcattatacaacattactatcaccctagcaaaatcttttgtgtcccttctcaatcaccaatcctgaccacaccccaagaaaactactgttcaaatttttctccatcattgattggctttgtctgttttagaacttcataaaactaaaatactgtagtaaattatgtacaattttatgactagcttcctttgctcaatataatgttttcgagatttattcatattgctgcatgtcagtagttggttctttttattgctgcatatttcattgaataaaaatgccaaagcttgtttattcataaaaaaaaa

SEQ ID NO: 1559 - DNA, 600 bp, Homo sapiens
acagaaggggtagtcactttagggatagaagattgcaagtactttccaagtctactttctatgagccaagaccctatctattsgaaaaataatttcaactgtaccagaagagcccagtgcccagaaaccaatatcagttctatacagatacaaggtgatgctgattatttcatcaaccatcttggagttcccatcgtgcagtttgcttacgaggacatcaaaacattagaggctgaataggccggacgcggtggctcatgcctgtcatctctgccctttgtgaggctgaggcgggaggatcaccggaggtcaggagatcgagaccaacctgaagaacatggtgaaaccccatctctactaaaaatacaaaaattagctgggcgtggtggcgagtgcctgtaatcccagctactcaggaggctgagatagaagaatcacttgaatcctgcaggcgaaggttgcagtgagccgagatggcgccactgcactccagcctgggggacagcgtgagactctgtctctaaataaataaataaataaagcctgaatacaagacaattggawwwwmawammwgttcctgcattatcttttgtaatatg

SEQ ID NO: 1560 - DNA, 601 bp, Homo sapiens
ggccctttcctccttccaccatgtgagaatgcagcaagaaggtgccctgtatgaagcagagggccctcaccaggcaccgaatccggtggcaccttgatgttgaacttctcggccttcaaaactgaagttttgtggccatggggatgctgacaaagattgcttgggatgcacacaaggcagcggcgaagcctgaggggtgctgccaggccgggctctccactggccacggcctgaccgactgctattccagaggcatcacccgtcaggcctcaccggaaggctgcacagccggtgccacctcagagagtctctggcaagaggtcagcctcctctggctgctcctgcccttttgtggatctgctttcctagtccaggtgctctgttcggagggctcagggacccttaagggaagacacctttcttcactctgactcagtacttttacactctcagctttttcccctctcactacccaactccccagcccctggtccacaacccttcaggaagcctttggttaggggccccctcaagagtgagatgacccccacatctgtgctgatcctcctgaccctgaaccgtatgggtgcattgttccaag

SEQ ID NO: 1561 - DNA, 601 bp, Homo sapiens
cggcctacggctgcgagaagagacagaggggagggagcttcaagactatgcgggggaggagccaagatggccgaataggaacagctccggtctacagctcccagcgtgagcgacacagaagacgggtgatttctgcatttccatctgagggaacaagaatacttggacacaattcaaagaacaccatcagatacctgaggtctagcttctggtcccaaatctgtcattcagaagtgtgtaacttgacaatttgttgaatctcactggattttatttctgtcaagagtaaaattaaccagataagaattatgctgagacatagcagtacctcaaaaagtggtggaggtaataagctgcaaagttggaacttgaatcccggacctcaagctccaaatccagaattcctcactttccccccgctacctgatacagaactggagaaaaataaatttgatttaattaagtgtagcagatcccaggaactattttatgtttaatgattactttcaagcttaatttgcctctatttaagtgtaactaacacataatctttaggataracatstcggaattctttctgaattatccccaaattttaagt

SEQ ID NO: 1562 - DNA, 1701 bp, Homo sapiens
atggctctcctcccagcttcactgtcagctgtgcttgaaggagaggctagcgtccaggacagcccaggctcagtcatgaaaagctatgtgtcagagaccatggcgagcccagggaaagacaattatcgaatgaagagctataagaacaatgctctaaaccctgaagaaatgagacgaagaagagaggaagagggcattcagctccggaagcagaagcgagagcaacaactttttaaacggagaaatgtggagctgattaatgaagaagctgccatgttcgatagtcttctcatggactcttatgtgagctctaccactggggagagtgtgatcacaagagagatggtggagatgctcttttctgatgattctgacctgcagttagcaaccacacagaaattccggaaactgctctccaaagagcctagtcctccaatagatgaagttatcaacactccaagagtggtggatcggttcgtggagtttctgaagaggaatgagaattgtacattacagtttgaagctgcctgggctctaacgaatattgcctctggaacctctcagcagaccaaaattgtcattgaagcaggggctgtccccatttttatagagctgcttaattcagactttgaggatgttcaggaacaggcagtctgggcactgggaaacatagctggagatagctctgtttgccgagattacgtcttgaactgttccatccttaatcctttgttaacactccttaccaagtccacacgactgacgatgacacggaatgcagtctgggccctgtcaaatctctgccgagggaaaaacccacccccagagtttgcaaaggtctctccttgtttgcctgtactgtctcgcctactcttcagcagcgactcggacttgctggcagatgcttgctgggccctttcttatctgtctgatggccccaatgagaagatccaggcagtcatagactccggagtctgccggagattggtagagctgctgatgcacaatgattacaaagtggcttctcctgccctgagagccgtgggtaacatcgtcactggggatgacatccagacccaggtcattcttaactgttcagccctaccttgccttctccacttgttgagcagtcccaaggagtcaatccggaaggaagcttgctggactatttcaaatattactgctggcaacagggctcaaatacaggctgttatagatgcaaatatcttccctgtgttgatcgaaatccttcagaaagcagagtttcgtacaaggaaagaggcagcctgggccatcaccaatgccacatcaggaggaacccctgagcagatcaggtacctggtctcactgggctgcatcaaacccctatgtgacttgctgactgtaatggattcgaagattgtgcaagtggccctcaatggactggagaacatcctgcggcttggagagcaagagggcaagcgcagtggctcaggggtcaatccttattgtggcctcatagaggaagcctatggcttggataaaattgagtttctccagagccacgagaaccaggagatctaccagaaggccttcgacctcattgagcactactttggtgtagaagacgatgatagcagcctggctccccaagtcgatgaaacgcaacagcagttcatcttccagcagcctgaggcccccatggagggcttccagctataa

SEQ ID NO: 1563 - DNA, 993 bp, Homo sapiens
atggctggacagcagtttggaacagaaatttgctcaaagaaactcagagctcaaaacacaaatccatggagctctgaaatccgagagaaaatttaccatgatccccagctgctccgagagatcaaaggacacaagtgtgacagaatcctgaggtgccagctccctgtgagcctgcagctggaccaggccgactgcaaacagcttccactgtgggtatcagggaatgcagtggcacccagaggcttggagatgcaggacctgccgagacccaaagaaggtgtcacagccctggttggaggagctcctaggtctgtgttccctgaagggacacagctcttctctccttctctcttctcttcttcttgcctgcaatttggcaagaaaggagcgcgtttcagccctgtttatgttacacctctttcagccctgctagttggcaggtcccgagttcttgtcctgagtccaggaaaaatgagtgcccaaagtctggagggggccgatgtggcagggggctggcatgtcagcactgccctgagcttgcacaaaccgggccgggttgtgactgtgcccaggtttggcctcaacttggatctgaatttggagtgggctctggaagcagagagacgccaggtggcaggaccagttcattctcattacttgggccagggtcatgatgattcattatctctcagttcatcctcattacgttgggcaaacagtcatgctgcagggtatagattatgttattctgttactttcagaatctctgagcaggatctcccaggttcatccaaactcgtgctttgtccacttttcactaggcccttgggcatcactgggctatcccagctgtccacagggccttcaataatgcacattgcacctggcttatccaagcagtgctcagcagcccacattgaccaagtccctgctgaccagaccccgcacatcaggtcctccctgatgacaccctcactgattagaccctcatga

SEQ ID NO: 1564 - DNA, 873 bp, Homo sapiens
atgactgaagaagagaaatacattaccaaaacaacaagatgccaaaaacactccccccgaaacattattttcatagctgtaaacgcagttgaaatttcagaaatatcttctcactatattgaccaagcacaaaaggagactgcattcaacagactcctgagcccactggcttccagcagggttctgccaacatgcgataactgccaacgactggaaagtgaggtcggggtatttattacccaggctctccatctgctgcttcacgggctagcagcacttggcatttgtggaagcaaggcatccttctcctgcagggcccctctccccctcaggattcccatgacatcttctctgctctcctccttcagacctaagagtggtaatagctccctgctgttgccagccacagggtgcttcaacataaagatgggtaacattcagccacccacagccattcacatgtgggatctgatggaatgggacagaggacaggaaatctactgcagtaaaagcagaattaatgattcaaaaacagctggagatattgaaacagaaattaaacctacttacctaactcttaaaactggcaaaagggcaaggcaggctgaaagccagcacctgaagaggggtggaatgtggatgttaaaaatctgtgaccagtcatttgcaggacattcacatacagctacgctttggaaaggagaatgtgaagagaggcttggtggaggcaagctcatatttcaaggcacgtcaaggaccaagatggatgatgtgcagctaacagtggaaacggatgtaaaacacaaagatcaggcccacacagatgcccacactgcccgcccccccctccaccccacttcaggatcaagatga

SEQ ID NO: 1565 - DNA, 1029 bp, Homo sapiens
atggcgtatgtaatggaaaagagaaccactggaaaggcccttccagcaccttcaggccacctttcagggcccattcagcatagtacacttggactcatgccctgcccctgtgtgtcattagcgcttgtcttgttgagtctagaacattcagatgtgatgggctttcaggaagctaatggcagtcttaccctgctgccaaatggaggaaataaagattgcctctgccctctctttgcccttgatcagcagttgctgttgacagggatgacaaatcagatggaacccaagagtgagaaccaggctttggaacttgccggttgtattgaggaatacgagaatctcaaggcctgtgataaaaacacaaaccccttaggctctgagcttaaggtggatacgtttttagtatttactggagtcgtaaaagctgctgactgtgaatgttgtctgtataaaatccagttcaccttttttattcagtgcattatcaaaaatggcacaacccgatctcccagagaaggagaagtgcctggcgtggactataactttctgactgtgaaggagttcttggacctcgagcagagtgggactcttctggaagtcggcacctatgaaggaaactattatgggacacccaagcctcctagccagccagtcagtgggaaagtgatcacgacggatgccttgcacagccttcagtctggctctaagcagtcgaccccgaagcgaaccaagtcctacaatgatatgcaaaatgctggcatagtccacgcggagaatgaggaggaggatgacgttcctgaaatgaacagcagctttacagcagccgattctggtgaacaagaggagcacactctccaagaaacagcattaccacctgtgaatagtagcatcatcgctgctcccatcacggacccttctcagaagttccctcaatacctacctctttctgcagaggataatttaggtcctctacctgaaaactgggagatggcctatactgaaaatggagaagtctattttatagagtaa

SEQ ID NO: 1566 - DNA, 243 bp, Homo sapiens
atgggaaatatagctcctactgggaagctgcttttcagcaatgtgtctgtactgtggaaaggggagcaagaatttggttatggagaaaggaaattggataaagatcacagagaagaagattatgatggtgccggtgtcactgagagatctactgacccgatgttgccttcttttgctgccttgtgtgtgctgtacgtatcctgcgttaggacccttgctttggcagcgttagctacaaagtag

SEQ ID NO: 1567 - DNA, 1293 bp, Homo sapiens
atggttattccaacaactatccatcattacaacctcatgtactttttggatgcaagctctggagttgaaacaccagagcttcactttcgagtagccagttctttcttaacagcatcctcgaggaagaaatggattcaaaaggagattctttatcgcagccaagtgtttaggggtttaagggagagacactactcagaaaggtttctggctgtccaacagcccttttctttagtctcccagcagactctgggggaggataaatggattcaaaaggagattctttatcgcagccaagtgtttaggggtttaagggagagacactactcagaaaggtttctggctgtccaacagcccttttctttagtctcccagcagactctgggggaggatgttcactcctgtgccagcactaatgtgtgcacagatgctggcaacactgttctccccccaacccctgctaccaccgccaccaatgctgccggtgtgaatgcatacatggacaccagcaactccatctctgctagtgtactgcccttgctgtgctgtcatcactggcataaacatgtgcaggaacaccacctccctgctcccacagttgctctgtgcaagccaacatgtgtgcaccttgccacattgctgtggctgctgtattgttccacagcccataaagcaaatcagcagactccatttcaactcttaatggattgtgacatgaaaaccactagtgcaaatgaggccctttctgggagtccctgcagaattaaacagcctgtggagaccaaaccaccatccttttgtgttacttcaagcccactcagacaccaggacagccctcacagcacctggttccagatccagccctgtagactcaggcccatggcccacctcaatgacatgatatccttcatggaccctggtgctaggaattatgccagcccctgtggacacaggtaccaggcccagttgtctgctgatccagaggatcagtttgccagtggcagtatgaatacagaaaagaatgacagtcccacagtaggaaaaacagcatggtttgaaggaagaggattccacggtgcttggacggtaaatctacaagattgtttaccaaagctgcttttcagaaaaccgaagggaaaagttgaaaatggcatggaaaagggcaaagagctttggagtgacagacaagaaatcttagcaaatgtggccctgattctactacttgacggctgtgtaatctcaggcaaaaccttcaccaatcgaaacttcaccttccacctccccaatatgaagtga

SEQ ID NO: 1568 - DNA, 1137 bp, Homo sapiens
atggaggagaaaaaggttgttcaagtctgtcctgagagcttcaaggcccttggtgtaaccctcccctgccctcccacccctaatctcacagccatgaagctcagagttactgaggaaatggcagggccacagcttcaatccagggccccaggaatttcaggctacactgtcatcaactctgtcctcctggactcaaaggggatcgcctgttatgaagaattcacattgattagtaggccaaagtccccaaaggcagccccagatccagcccatgtccctggaggaagcttctcagatcctgcaccaaagcacagtgtacagacagaacccctcaaaccaccacacagaccaagtgtgctgtgtgaggtggtcatgaacaagctcaaagtggagatggccttggaaacaaactggcaatacaaggtggaaagtgcaggataccagtgtagcagggacccaagcagagaggggcaagaagcgggggacacgtatgtagtggccaacaggaaggactctagagtgcagacatttgcaaaacaggagagcagaaaggtgtgcatgagcctggaattctatagcacgtcatgcaaagaaaacatcagggttctccagctcacccatgatccactcaagcaggtgtgccgtttctcccatctccgtaagatcttgaggaccttcaacagcacttcagcaaaaaacattttcaggtttcctcagaatattaacacacccaaagccctcctcagtgcacaaatgtcctctgcagctgcatgtatacagcagacactgactgaggaatgggtccctgaagaacagctcagccatcacacccaacactgttctgtttctctccatctctttcgctggatcctctccttcctcctgggcaagagaagtagaacaagagggaagaagtggatgggagagtacaaagaggccatggaagaacacactgtggggaagttcagttgtggacaggcagagggagactggttgaacagcaaaaggcagatggccaggcagcgcaccctcgccccaatttcacctgtcaaatctttgcactgtaaacagcagacccacgctcctcttttccaagatcctgcatccaggcctgccaaagcccagagctatttgtag

SEQ ID NO: 1569 - DNA, 4824 bp, Homo sapiens
atggagccaacagccaagggacggactgaggagagtttcagctacgtcatcagagcccccagcagtgaggggttcgacataatgaacgttgatgtgaagattgacacatcctggatattccaggacatggaagatagtgctgaggagcgggaatgtcttcaggaagaagcagctggccgcccagacatggatatgggtgcgctcaggaggcagctggagtcctccgagcagaagctgtcagcagcagaggacaagtacgtgacatcggagtccgggctgagaagcagaattcaggagctggagctgtcagaaaggaaactcctccggaaggtggaccagctgagcacccacgtggcccaggagagaagcgcctggctccaggcccaggagaagctggcggcgctgcagggggagctggccagccaggccctgtttcctgtccagcagagccgtgggaactcagcagcagctgcagttgggcaaagacagtacaggatccgggaggagagcgtggccaggcggcagcagtggcggctgcggcggttgcaggagcggttgcggcgcaaggacgaggcactggggcagcaggcggtggccctggagcgctgccggcggacccagcggcgccagctgggcctgaggggacaccgcggccccaggctttccaggggcgccaccgaggcggctgcggaactgcgcgccctgcaggcgagggcagagcgcatcgagcgcgagcgggaagaggcggctcgcatcctgcatgaacaccgggctaccgagcgccagcttccgggtcatttggaggagctgcgctgttgcatttatggcctgaagctgtcagatattggcctgcaagggccagcccgcggttggcgtggccagcatctgggctctgccctggagctggcttcccttttactgaagcttcacgccaccatggaatatgtcctctttgtgctgtacttctctttcttcctgtgtctctgtgccctggtgtgcctgtacttctctggctgccaggagatgacctataagcatgaaggtggctctgttgaaaatgataggaaggtgagaagacaggtggctgagagagactggatctggttggggggctatttgttttggggtcaccatcaccatcaccaccacatcatcatcaccatcaccatcatcaccaacatcaccatcaccatgaccaccatcaccatcatcaccattaccaccctcatcactatcaccatcaccattgccaccctcctcctcatctcttcctgggcttgtgctcatctagtaggatgttggagtccagagagcatcgcatgctgtgtgactgcccaaggctgccagtgcatcttcaaaggactgggagtgacccaggaggaccgagagccacacgcaggtcttcagcaccttgctctggacaacagtggtgactgtcaaaggatctccctccataagcaccccaccatggctgcccacggcctcaggatcaagttcaacctcctatccacggcattcaaggcccccggtgttctgctccttcaagctcagtcccccatatgccaccttagtcacactgagctgcaggtccctgagtgtgccaggctcttctgccttgatgctctgggctgtgttcagggtgactcactgcccctgcccagggaggaggccctggacccctgcagaagccaagactggcggaactccctgcggtccaatgatgcacccagacaaagggccccagcaggccagtccccagaggggccctgcacctggagccgcatcaggcctggacgggcctcttctgttttggctccaggcccggagaccacaagcgagctccccagagacctggccggatccaaccgtgaacagcttactctggcagagcccagcttggatgaacagattcttctcctggtctgtggctgcccaccagaggagtgcttggacgagtcactcctccgcatggacctggcctggatttcagagaatctagcagctgacccagctgcagaagcctttctcctggtgcagacatccgcactccctctctgggggccggctggggactccgcttcttggcgaccactgctgctccaggaggttccctcagatggacaaaaaatccaagaagagttggccaccaggtccccgcctcctcccaaagccacaggacacccaggctgggattgtcaccagacaagaggccgcggtgcctccctcttccacgaggccccctacatttcaaatcacccatttctgaaaaaacaccccaaggatctgaaagacacttggaacaatggaggaggaagccttgcggggagaactgaagaggggaaggcaagggggactttgggcaggaaggggaaaaaccttggtgacaagtaccagctaagtcaggaaagccatcagaacctgagcttggagaatggggctggagctgcagaggacgtgcaggatcagaatggggcttcagagactaaggccgccacctgccgccctgggtcctggcaggagtttttgatgcctcttctacagggggaggcctcagtatcaaaggagggtcccgaatccctgagcaggagggaaagggtggaaggatacgtctggggtctccgaggaggactgtcatcagagaatgaggaagtggcacccccagccaccttctccagggctcatgagaccaaagagccatggccaacagacagtcagctcctcgcagggaaagtcagagccactgggaggacagctaggggcaaggaggaaaaccaagtgtggcttggaaatgctctgcttctgcaaggaggaagcctggaggacaaagggctagaggaagaggatgagatgccgcatcaagaagcatccggtctggggtgcaggggtgcccccgaggagcctgactcccaggaacatgagagcaaggaaatgcttttctttgcaggagagacaggtttgccactgtttcccagatttgccttatcagttgaaggggccgaacccactgatcatggtcatccacaggctgtgagcaaaggacacaacaggtgtgcactcacaatcgatgagcttgcacaggacgtggaggcttgtttccagcagctgtccaccctgcagccgggcagcaggggctggcagtgctcagcctctgcatgtaggggagagaactggagctttgctcagaagtggcacagtggctgggagagagctcactctcagcaggtttggggaaattggggtatttgttctaatgaagaagcgaagtctaaagagagtggtgaaggtgataagccgggaaagaccacggccctgggcaccagcgaagttcctggtaacccagggacactgcctcattgggatgaagccagcccaaaccctccacaggggcctgctgagccctggggtgccctcgagagagtgaggagcaggtttcatcagctcatttctggattgaagaaacagagaagccagattttacatgacaacaccaaacttcacggagaccaagagaggttccatgaaagagtgtgcgcccttgaaagagagagagagagagaggtgacaaaaatatccaggctcgagcgggataaccacaggctggtaggggacatctctcagttaaagaaagaactggatcaatatttacaggcaatctctgaccttgaagactgcaatgggaagagttactgcaaaattttggagcttgaagaggaaaatgaaacactgaaagggaatctgggccaactccagaaagccacgtctgagagtgtcaggaaatccaaagacacgatggagcaagtcaccctggaaaactggaagctccagacactgatctcggagcttggcgtcagttataaagagctgataaaggatatcgtgctaggaatagaagacatgatccgggccttaagtggggagaacgagcaccttctacgcagggtccatgtcctggagagggaagtcaccttgcagaggagcacggatcaggggcgtttggtgaggggaagggagcacctccagggaaaagccaagatgcacgctctagacaaagaggtgcaggtgactccactcacaggacagctgctttcaagagcctgtgggccacccttggaggaggaaatgagtctggctgcagggcagacaggaccttccacaggcaccgggaattccagacgcggtgctgattctccccctccatcgctggtctggagaaacactggtgtagccaatgccctgcaaggaaatgtcagtggagcagaagtgaaagaagcacatttggagaaagaggagaagaggcccaggtgttctgtggctcaggggcaagctctgagctccctgagcaatggccccatgctccgggactcagaggccgaggttactgaggaggatcccaggctgcgggcccagcagctccatcaccgggtgctgaccctgcagtgccagctcagggaccagggcgctgcccaccaggcgtctctggacgaggccacccgcctccaggaggagctccaggccaagcttgaagaacttcagaaaaagcaacatgaagcaaagttggcagtgactcccctgaaggccaagatagcttccctcgtccggaagtgccgggagaggaaccgcctgatcacccacctgctgcaggagctgcacagacatgggctggggaacctcctgctctccgagctggcgcagaacatgctcaacgacgtggcactggctgagtacacggccaccttcctggctccgggagtcccagagacaagccaccacctggacgtcaagtctgagatgacggcagctttaagaggtcagtgtgatttttga

SEQ ID NO: 1570 - DNA, 645 bp, Homo sapiens
atggagggctaccggttagcctctgcctcggtgatggagggctactgggttaacctctgcctcggtgatggagggataccgcttgaagaacttcagaaaaagcaacatgaagcaaagttggcagtgactcccctgaaggccaagatagcttccctcgtccggaagtgccgggagaggaaccgcctgatcacccacctgctgcaggagctgcacagacatgggctggggaacctcctgctctccgagctggcgcagaacatgctcaacgacgtggcactggctgagtacacggccaccttcctggctccgggagtcccagagacaagccaccacctggacgtcaagtctgagatgacggcagctttaagagtgaggcaaaagcctctgctcattgctaactttcgtctgctcttgcctcctggaactggtggagaagtcgtctccattatggtcatctgtctgcgcaaggcactgactcgcctgccacagcctttagaggagggagaagaggcagtagcaggcctctcatgtttactgcggtcactgtggaaccaggtctccccgcacaacgtctgcaagaaaaaggcggaatgccctgtcctgccctccaagtcgataacgtcccagcaccctctgagctcctga

SEQ ID NO: 1571 - DNA, 2037 bp, Homo sapiens
atgggcagaagacaagaggaagccgttctgctggcatttcgtcgggatgaagacaacacagccaggaaatccagagatgatcttgttcagtcccctatcctcttaactgtcgttggtaacgccttttttgtttttggggggggcgtggcctcttctttgcgcgggacgtgtcgtctgcgagctatcattacctgggccctctctcttcccacctgcctcagcactggcttgaggactcaagtccgggaactgttggtggaaatagaaggcatttcagtggatgcctcagcccaggctgtgctttgcagagaatgtcaactcttaagttttcattctgccagccagctgtgtctcctggccttgaaccggggcattgctgctgtcaaggaggatgcagtcgagatgctggccagctacgggctggcgtactccctcatgaagttcttcacgggtcccatgagtgacttcaaaaatgtgggcctggtgtttgtgaacagcaagagagacaggaccaaagccgtcctgtgtatggtggtggcaggggccatcgctgccgtctttcacacactgatagcttatagtgatttaggatactacattatcaataaactgcaccatgtggacgagtcggtggggagcaagacgagaagggccttcctgtacctcgccgcctttcctttcatggacgcaatgcttggcgctgatatattggttggagagagaatatttaaagccagcaagcttattgtatggtggctttcagacaacaaagccagcccacagctgtgtttgcagatgggcagggaattagctgttgctgtacaaaatcttgacatggacctggggaatagaccctgcttgcctcattcatcttcctcctcatctcccaaagtgtcaggtcagatcctgcccaaacttgaaggcaagaaaacagtaggccctaatcagtcagtgagcaccggtaatgactgtaataactcagacccaaatgagagccctcattatgatctgcatcacgcatggacccatgctggcattctcttaaaacacaaatacagtttcctggtgggatgtgcctcaatctcagatgtcatagctcaggttgtttttgtagccattttgcttcacagtcacctggaatgccgggagcccctgctcatcccgatcctctccttgtacatgggcgcacttgtgcgctgcaccaccctgtgcctgggctactacaagaacattcacgacatcatccctgacagaagtggcccggagctggggggagatgcaacaataagaaagatgctgagcttctggtggcctttggctctaattctggccacacagagaatcagtcggcctattgtcaacctctttgtttcccgggaccttggtggcagttctgcagccacagagactgggagtgagttgggttgtaaggagagtagcacggagccatcaacaaccacgcaaaatgtcagcatccctgaaggacggagtggaggcttagaggcagtggcgattttgacagccacataccctgtgggtcacatgccatacggctggttgacggaaatccgtgctgtgtatcctgctttcgacaagggacctgacagctgcccgagagacactcaacatgacagccgcctggcaaactgtcacttgaaacctctaattcagacacatcagataaaacaaaagcaagatgctcttcaagatcccccgaataaccccagcaacaaactggtgagcacgagcaacacagtcacggcagcccacatcaagaagttcaccttcgtctgcatggctctgtcactcacgcttaaagacagtgtacagaaaccagacatcagcctgacggggcgcttagtccagacactcccgacacgcatgcgccatcaacgtggagaaagcaaagatgtggcgcctctggcctcttggctttccgagcccagcaccagctcggaggctgtgaggcacacggggctccgcacacgagcactttccccgtggcctgaaactcccgatgaccggccattcacttag

SEQ ID NO: 1572 - DNA, 1830 bp, Homo sapiens
atgactaaattggatgctctagccagtgactatctaatacattcacctctttgggagcccaagaggggagtcttccccttggcttctctccttggtttgggggtaactgacagccagtgccctgcagctccagttgtctggattattgcatttcctaacactggtctcgtacctgcccaagcaggccatgacttagcagctgatgcacaatgcagctttgggtttttaccttggaaaatactgacagcatttctgaagatacgagatccaaagcctgatggggctggcaaacagtcagaaaagtctagggcagcatttcctaaggtaagagctgggcctgggcatggctgccttgatgccatgcgcatgagtcacagcagctgcagtgccaggttgtaccctgctggaggaggactcctcctgcagtgcttggagcagggatctggctgtcctggtggctgcatgacagtgcacaggcagaaggtgcccgtgctcaaggtgctcaaggtgcaccctgctctgcagaaggtgcagctcctgcgtcggctggaaggcagaggaaggctgcagggaggattctggggtccagttgtgcaggagcccatgggtccagctgcgcacagtagggccgaggaagcttggtcctgggtgcaggaacctgagagcataagccacagaggaggagactgtgagacaagaagaggagcccagagaaagcccactgtgcggagcctgctttccctgcatgggaaagaggtgagtggagacatgatgaggcacacagataaagtccatcatgtggagatggcttcccctgggtgggaaggaggggagcggagtcacaatgaggcccacagagaaattctgagggtggaaggaaggaaaaagaggagcaaagccatcaaatttccagatctggcttgcaaaatttctggaaagacatgctgctaccaaggttttgggcatggcccaaggcagggcttccaggatgacaagaacaccacttggagacagcagcggaagacactgagcagcagcatggcctgtcagggcagaggaagtttcagttaccttcaaaatctgcacatggaggtgctatcaatgcctgatgggggaaaccccttcactcccagcaagtggggacagctggtcagcctgggagaaccccagatgcaagcagaagaaagtggggccggcatgctgaacagtcatcaaggaaaaaccccacagacaaaggcgggcttgaaggcagcccctgtgctgggggcagggacatgtctaagaccattgcaactgcccacaaacaacataaggaagcacactaagatgctgtatgagtcagagcagcctaacaggaagagctgcaacaagcagtctcccaagcctcagttgtgtaacacaataaagcttatttcttattcgcaatcccatattcctgtgcagatgaattggtgtggaggggagctgtggggctcctgcctgcctcgcatgcctccaggaacgcatatccttccgtggggttttatccctggagcacttagcatagagccatccactgtgcgaacacagcagcacacggcgttacagaaagatcccaaacacatacacacatcgcctggctgtcctgccatgggttttatccctggagcacatagcatagagccatccactgtgcgaacacaccagcacatggcgtataaaacatgtacaattgcaaccaccgacactcccaactgcagcgagataagctcaccagaccaacagcaacagcggcagaaagggcgctcctacctcctcatccagtgttttccccactcttcaagtaggtga

SEQ ID NO: 1573 - DNA, 558 bp, Homo sapiens
atgtctggccgtggtaaaggtggaaaaggtttgggtaagggaggagctaagcgtcatcgcaaggttttgcgcgataacatccagggcatcactaagccagctatccggcgccttgctcgtcgcggcggtgtcaagcgaatttctggccttatctatgaggagactcgtggtgttctgaaggtgttcctggagaacgtgattcgtgacgctgtcacttacacagagcacgccaaacgcaagaccgtgacagcaatggatgtggtctacgcgctgaagcgacagggacgcactctttacggcttcggttctcaaagactacagaagttggaaacttcgcggagagactgcaagttaccctttccaaaatggcgggaagggctaaaaacaaagaaagctcgcacccagacggcgggccttaaaccaaggcgaatccgtgagcgcaacacatctgcttctgtggctcctgatggatctgagaagatggacgtggaggatgaaaatctgtctgattattttgaactgatgtttgttgctatggagatgctgcctatatgttga

SEQ ID NO: 1574 - DNA, 216 bp, Homo sapiens
atgcccaagacagctgtcctggcagccgagaggcccaagaaagcttggggcgtccttattccgaaaaagagtactaagcggaccccaaaagcttttgctggtggaggctgctggagaaggttggttggtcaaaggtggccaagaaagttcccaagccggaggcatccaagcctaagaaagcggcccccaaaacaaggagatataagagtaccttaa

SEQ ID NO: 1575 - DNA, 279 bp, Homo sapiens
atgctgaactttttgctaaaaagggtagcagcagcagcagcagcagcagcagcagcagcagcagcagcagcagcagcagcagcagcaatgtttcacttcttcagaaagcctccggaatctaaaaagccctcagtaccagagacagaagcagatggattcgtccttttagtggtgggaaacaatctgaaaacaacctgggtcaccagaggtcaccaggcctctggttttcctgaagaccccactgcttctccagaagctgccatggccaccttgctctga

SEQ ID NO: 1576 - DNA, 2889 bp, Homo sapiens
atggtcgtacgcacggagcgcacatccctctccttcctgattggccgagcgggggtgtgcgtgatgccacgctccgcccgtcggatcatggcccaggtagcagtgtccaccctgcctgttgaagaagagtcctcctcagagaccaggatggtggtgacattcctcgtgtctgccctcgaatccatgtgtaaagaactggccaagtccaaggcagaagtggcctgcatcgcagtgtacgaaacagacgtgtttgtcgtcggaaccgagagaggatgcgcttttgttaatgccaggacggattttcagaaagattttgcaaaatactgtaaagccttagggacaacagtgatggtgcctgttccctatgagaagatgctgcgagaccagtcggctgtggtagtgcaggggcttccggaaggcgttgcctttcaacaccctgagaattacgaccttgcaaccctgaaatggattttggagaacaaagcagggatttcattcatcataaatagacccttcctaggaccagagagtcagctgggtggccctgggatggtaacagatgcggagagatccatagtatcaccaagtgaaagctgcggccccatcaatgtgaaaactgaacccatggaagattctggaagccacccttcttccacaagcaatgaagtaatagaaatggaattaccaatggaagattccactccgctggtcccttcagaagaaccaaatgaggaccctgaagccgaggtgaaaatcgaaggaaacacaaattcatccagtgttacaaattctgcagcaggtgttgaagatcttaacatcgttcaagtgactgttccagataatgagaaggaaagattatcaagcattgaaaagattaaacagctaagagaacaagttaatgacctctttagccgaaaatttggtgaagcaattggcgtggatttccctgtgaaagttccctacaggaagatcacattcaaccctggctgtgtggtgattgatggcatgcccccgggggtggtattcaaggcccccggctatctggaaatcagttccatgaggaggatcttggaggcagctgagtttatcaaattcacagtcatcaggccgcttccagggcttgagctcagtaatggtgagtattctacagtgggaaaacgcaagatagaccaggagggccgtgtgtttcaagaaaagtgggagagagcgtatttcttcgtggaagtacagaatattccaacatgtctcatatgcaaacaaagcatgtctgtgtccaaagaatataacctaagacgccactatcaaaccaatcacagcaagcattatgaccagtatatggaaagaatgcgtgacgagaagcttcacgagctgaaaaaagggctcaggaagtatctcttaggcttgtcagacaccgagtgtcccgagcaaaaacaagtgtttgcaaacccaagtccaacccagaaatcccccgtgcagcctgtagaggacctagctgggaacttatgggagaagttacgtgaaaaaatcaggtcttttgtggcatattctatcgcaatcgatgagatcacggatataaataataccacccagttggccatattcatccgtggtgtcgatgagaatttcgatgtgtccgaagaacttctggacacggtgcccatgacgggtacaaaatctggcaacgagatcttttcgcgtgttgagaagagcctgaaaaagttctgtatcgactggtcgaaattagtaagcgtggcctccactggcaccccagcgatggtggatgccaataacgggcttgtcacaaaactgaagtccagggtggcgacgttctgcaagggtgcggaactgaagtccatctgttgtataattcatccggaatcactctgtgctcagaagttgaagatggaccacgtcatggacgtggtagtgaagtccgtgaactggatatgctcccggggactgaaccacagtgagttcacaaccttgctctatgagctggacagccagtatggtagcctcctgtactacacggagattaagtggctcagtcgcgggctcgtgctaaagagatttttcgaatccttggaagaaatcgactccttcatgtcatccagagggaaacccctgcctcaactgagctccatagattggatccgagacctggccttcttggttgacatgacgatgcatctgaacgctttgaacatctctctccaaggacactcccaaatcgtcacgcagatgtatgacctgatccgggcgttcctagcaaaactgtgcctctgggagactcatttgacgaggaataatctggcccactttcccaccctgaaattggcttccagaaatgaaagcgatggcctgaactacattcccaaaatcgcggaactcaagaccgaattccagaaaaggctgtctgatttcaaactctacgaaagcgaactgactctgttcagctccccgttctccacgaagatcgacagtgtgcacgaggagctccagatggaggttatcgacctgcaatgcaacacggtcctgaagacgaaatacgacaaggtgggaataccagaattctacaagtacctctggggtagctacccgaaatacaagcaccattgcgcaaagattctttccatgttcgggagcacctacattctgcgaacagctgttctccattatgaaactgagcaaaacaaaatactgctcccagttaaaggattcccagtgggattctgtactccacatcgcaacgtgatggagagaaaactcctggcagggccctatggtacagctgggtctggcaagctcagcgctcttttggagaaggaatcccagataggctggtttataacgggagttggaggggagtccaggtcttggtggaagtga

SEQ ID NO: 1577 - DNA, 2802 bp, Homo sapiens
  misc_feature 1: n = A,T,C or G
ncgaggggctacgagtatgtgttggagccctcacccgtctccctgcctctggacagacctcaggagacacgggtgctgcaggtctcctgcggccgagctcactctcttgtgttgactgacagggaaggagggatcatggcccaggtagcagtgtccaccctgcctgttgaagaagagtcctcctcagagaccaggatggtggtgacattcctcgtgtctgccctcgaatccatgtgtaaagaactggccaagtccaaggcagaagtggcctgcatcgcagtgtacgaaacagacgtgtttgtcgtcggaaccgagagaggatgcgcttttgttaatgccaggacggattttcagaaagattttgcaaaatactgtaaagccttagggacaacagtgatggtgcctgttccctatgagaagatgctgcgagaccagtcggctgtggtagtgcaggggcttccggaaggcgttgcctttcaacaccctgagaattacgaccttgcaaccctgaaatggattttggagaacaaagcagggatttcattcatcataaatagacccttcctaggaccagagagtcagctgggtggccctgggatggtaacagatgcggagagatccatagtatcaccaagtgaaagctgcggccccatcaatgtgaaaactgaacccatggaagattctggaagccacccttcttccacaagcaatgaagtaatagaaatggaattaccaatggaagattccactccgctggtcccttcagaagaaccaaatgaggaccctgaagccgaggtgaaaatcgaaggaaacacaaattcatccagtgttacaaattctgcagcaggtgttgaagatcttaacatcgttcaagtgactgttccagataatgagaaggaaagattatcaagcattgaaaagattaaacagctaagagaacaagttaatgacctctttagccgaaaatttggtgaagcaattggcgtggatttccctgtgaaagttccctacaggaagatcacattcaaccctggctgtgtggtgattgatggcatgcccccgggggtggtattcaaggcccccggctatctggaaatcagttccatgaggaggatcttggaggcagctgagtttatcaaattcacagtcatcaggccgcttccagggcttgagctcagtaatggtgagtattctacagtgggaaaacgcaagatagaccaggagggccgtgtgtttcaagaaaagtgggagagagcgtatttcttcgtggaagtacagaatattccaacatgtctcatatgcaaacaaagcatgtctgtgtccaaagaatataacctaagacgccactatcaaaccaatcacagcaagcattatgaccagtatatggaaagaatgcgtgacgagaagcttcacgagctgaaaaaagggctcaggaagtatctcttaggcttgtcagacaccgagtgtcccgagcaaaaacaagtgtttgcacacccaagtccaacccagaaatcccccgtgcagcctgtagaggacctagctgggaacttatgggagaagttacgtgaaaaaatcaggtcttttgtggcatattctatcgcaatcgatgagatcacggatataaataataccacccagttggccatattcatccgtggtgtcgatgagaatttcgatgtgtccgaagaacttctggacacggtgcccatgacgggtacaaaatctggcaacgagatcttttcgcgtgttgagaagagcctgaaaaagttctgtatcgactggtcgaaattagtaagcgtggcctccactggcaccccagcgatggtggatgccaataacgggcttgtcacaaaactgaagtccagggtggcgacgttctgcaagggtgcggaactgaagtccatctgttgtataattcatccggaatcactctgtgctcagaagttgaagatggaccacgtcatggacgtggtagtgaagtccgtgaactggatatgctcccggggactgaaccacagtgagttcacaaccttgctctatgagctggacagccagtatggtagcctcctgtactacacggagattaagtggctcagtcgcgggctcgtgctaaagagatttttcgaatccttggaagaaatcgactccttcatgtcatccagagggaaacccctgcctcaactgagctccatagattggatccgagacctggccttcttggttgacatgacgatgcatctgaacgctttgaacatctctctccaaggacactcccaaatcgtcacgcagatgtatgacctgatccgggcgttcctagcaaaactgtgcctctgggagactcatttgacgaggaataatctggcccactttcccaccctgaaattggcttccagaaatgaaagcgatggcctgaactacattcccaaaatcgcggaactcaagaccgaattccagaaaaggctgtctgatttcaaactctacgaaagcgaactgactctgttcagctccccgttctccacgaagatcgacagtgtgcacgaggagctccagatggaggttatcgacctgcaatgcaacacggtcctgaagacgaaatacgacaaggtgggaataccagaattctacaagtacctctggggtagctacccgaaatacaagcaccattgcgcaaagattctttccatgttcgggagcacctacatctgcgaacagctgttctccattatgaaactgagcaaaacaaaatactgctcccagttaaaggattcccagtgggattctgtactccacatcgcaacgtga

SEQ ID NO: 1578 - DNA, 756 bp, Homo sapiens
  misc_feature 1: n = A,T,C or G
nacgtggaaattgagctgaagccaaacagatctggccttatttcccatgggcctgtgcaccaccaatttggatctgagatcagacataaccttgccataagcagcaaagggcttggtgaaccctcaaaaaggctgtcaaacacccagaggccttggggatcaggaaggagccatcatgtggtctttcatactatggttctaaaaggagaggtaaaggaggtccaaagttatgagaacagaagtaaatacatggaggtagaatgtggtgcgaatgttgcatatgctcagataatgccaaaacaaaaagaacaagccacagtttccaactttaagaggtttgctctgttagatagtttcacttctcaggacaatggagcaatcacagatgtttcaacagaaggtgcttgcatgccattcgttaatacggcgccatacgggactcagtgtggccactgcaatataaccaaattccgagaccttgagtggtccctcatctcattgctgaaaacactgaggcacagagaagggaaagggctggctcatgacaccaaatcatctaaaaggataaggaaaatcagaggcagagagaaagacaaacagcgatggagagggcaatgtgcaggggcgtgggccattccacacagccctccaggacctgagcacatgcccgcggagcgtgatgactgcctgcagctaaggaaagcggcaacatcagaagcaccaagcctcgcaaagctttgtgacaaatttgcataa

SEQ ID NO: 1579 - DNA, 471 bp, Homo sapiens
atgcttggtgggcctcttcaggtcctagaagcagcatattcttcatgtaggaacacttctcggacccacttctcagggaacaggcacagctgtgagttttcagagccaacagcggtggcagcctcagaggtggtggcagcttccctggtgggtcagttctgcggtgtcccagctctcaccgtccagctgctcaagttcacccgggaccaaccaccaggtggcgatgttggccacaatacggggacgggcccctctctggcccctggtggcctaggacaccccgggccattgctgcacagggcaggggagctgaccagcgccgtggaggggggcgcggagctccatcggacaaagctccttcccgaggctgctttctgggccatgagctcggcctcgcttgctgctgtgcggctgcaggaggaagacactggtcttcgccagcagttctcactgcagggaggctgtccttaa

SEQ ID NO: 1580 - DNA, 2115 bp, Homo sapiens
atgaacacatgtggagtagcccagagcttgatcgacaaagaggagccaagcccaggtggagacaccagcttgaaacagagcccccagctgaccgccattcaacctggatttatttgtggcttttcaatagcaacaggtgcagcagcaagactagtgtcaggatacgacagctatggaaatatctgtgggcagaaaaatacaaagttggaagcaataccaaacagtggcatggaccacacccagcggaagtatgtattctttttggatccatgcaacctggacttgataaaccggaagattaagtctgtagcactgtgtgtagcagcgtgtccaaggcaagaactgaaaactctgagtgatgttcagaagtttgcagagataaatggttcagccctatgtagctacaacctaaagccttctgaatacactacatctccaaaatcttctgttctctgccccaaactaccagttccagcgagtgcacctattccattcttccatcgctgtgctcctgtgaacatttcctgctatgccaagtttgcagaggccctgatcacctttgtcagtgacaatagtgtcttacacaggctgattagtggagtaatgaccagcaaagaaattatattgggactttgcttgttatcactaggaggcacaggtgtactatggtggctgtatgcaaagcaaagaaggtctcccaaagaaactgttactcctgagcagcttcagatagctgaagacaatcttcgggccctcctcatttatgccatttcagctacagtgttcacagtgatcttattcctgataatgttggttatgcgcaaacgtgttgctcttaccatcgccttgttccacgtagctggcaaggtcttcattcacttgccactgctagtcttccaacccttctggactttctttgctcttgtcttgttttgggtgtactggatcatgacacttctttttcttggcactaccggcagtcctgttcagaatgagcaaggctttgtggagttcaaaatttctgggcctctgcagtacatgtggtggtaccatgtggtgggcctgatttggatcagtgaatttattctagcatgtcagcagatgacagtggcaggagctgtggtaacatactattttactagggataaaaggaatttgccatttacacctattttggcatcagtaaatcgccttattcgttaccacctaggtacggtggcaaaaggatctttcattatcacattagtcaaaattccgcgaatgatccttatgtatattcacagtcagctcaaaggaaagaatgcatacacagccacagctatcaacagcaccaacttctgcacctcagcaaaggatgcctttgtcattctggtggagaatgctttgcgagtggctaccatcaacacagtaggagattttatgttattccttggcaaggtgctgatagtctgcagcacaggtttagctgggattatgctgctcaactaccagcaggactacacagtatgggtgctgcctctgatcatcgtctgcctctttgctttcctagtcgctcattgcttcctgtctatttatgaaatggtagtggatgtattattcttgtgttttgccattgatacaaaatacaatgatgggagccctggcagagaattctatatggataaagtgctgatggagtttgtggaaaacagtaggaaagcaatgaaagaagctggtaagggaggcgtcgctgattccagagagctaaagccgatggtaggtggagatgaggaggtggccgccctccaagaatttcactttcacttcctctctctctctgtcttcactgactgcacttcttcaggagaagcttttgttatctgtatcacgcaggacatgctgctctttctgtttgtgtgcttacccatcacttggatggcagaattcttgtcacaactgagaccaccttctataaaacagatcattgaactaaacatgagaacttccggttttgttcttgaacttttccctgagagaggctcgctagttaaggaaactttaaagatttatgaatttttttatgattctctgaaagtgattttggaaaaatgtaccaaaagtgatgaagaggtttag

SEQ ID NO: 1581 - DNA, 2133 bp, Homo sapiens
atggatacaagccttcttgctagcagcagaattgacagtgaaatttcaatcgcttttatcaacactcctgacatcagtgaattactaaacatctttcacttttgcaactcaaactatagcacaagtacctattgggtccaaggcaactggctcccatctggaccagatctctgtagcagcacctccagatgctacagcagaaaccagtttctttatggtttggaggagcctcctgcaggtgcaatgagacagctctatggtgatacttctcaatgcctctttgacctccaagtggaaggttcatttccggactcatatgtgggagccttgaggcgggcgaggttccagcgcgaggccggccgccctcaaccgctcccagcgccagttgcggcggttgatggcagggagacgcgcagcgcgagagcaaagggcggtgacccaacggccttcgctctcatggcgtccttcttggtgttacctaaaaataaagccaagggtgatcagaagccagggacgctggccttctcgcggctttcccccgatgtctctctttattccagctgcctgaaactcggtcccacgaatggcaggcagcgtccaaaattcaaccccgtaaagccagcaccagccaataaagcgcacggatggaggccacgtgacagcagtgggccggccctccggctgagccctgatctctatggtttccgcggctcgctagaaggacaaaaccatattcctgctgctgtcagttttgatgcactgagaaaacttcagagacctaagctttttccagagaagagaagctttactggtgttccagccctaagaccatggagagaggaattggaagccccagaattgattgggtcagaaattgaaaatgatactatcagtgacccaggtttgaatgtctctctccacagcattgacttcactaatggatgtgacctggttggcagcagtagcttgcacaacatgcttgtttgcaaaacctttgttcaacaaaactgcagatgctctgttgaatccactggagattgtcctgatactaaggacaagtatgctcatatgacattaacagacaagacacttttcagaaagacagcccacccggacttagggagaagggggctcaatacgggcccgaaacgaggctacagaccttctcaggagcaaaggcagcgactgcaggcaaatggggctgtgggccggggtaatgatgcgggacaggagaagccaaagggcagcaaggctgggggcgggacttgtgaaaatgggaggatgggcagaggagacgtagaagaggggacaggacaggacaatgagaggcggagcgcggggagtgcgatgcggccaccgggggctctgggcgctgggcaggggccaggatgccgggggtctgagcgcaggcagcgggaaggagtgggttctgaggctcagcaagggggagagaaggcagccttgaaggtgttgggtaaagaccacctgcccagctctccaggcttgctaatgcgggggaaggagatgcagcccaaggatcctgaagctcttgcatcaagtagctatactccacccagagctgccggccacagcaccttccaccgggatccctgctatcactcatcagcagatgaattccacagcagccatttccaccatcacagcaagggcatctgcccacctgaccttgcagcctccttgagccctcagctctttgctatggacatgacttccactactaacgctgtggttttcaaatcttcaccaagctccagagtgagcaccctcttaatttcccaaattcagtgcacaatagaggcaccctggaaagacatcggcttacgtctgcctggctacattcatattctccaggcccacccctcagcccacacttggggccccctgatgggcagcaatgaaaagcctctgtccccagtgcccctgtttttccaagccttcccatcggggctcctccaggcacctccagtttatggagcagcgtctctgcaacatcctcctccagaacagattgtgcgatggggaatggcaccacaactgctgcaactgaacacaattagggtccccattcagaaagagcgcccaaggcccacctggtacacacaggtggtatga

SEQ ID NO: 1582 - DNA, 711 bp, Homo sapiens
atgggaggtgggggcgagggtgttatcatcatcattggaatgctggttaaaagttctgagagcctaaagaagtcacagcagagtactaagactggagcttttggagaagttcacaaaggatgggaggagccagcatggaagatgaaagaggagaagcagcggaggggatcaatgctcagtacagccatatttgtctatgctgctacgtctccagtgaatggttattttggaggaagtctgtatgctagacaaggaggaaggagatggataaagcagatgtttattggggcattccttatcccagctatggtgtgtggcactgccttcttcatcaatttcatagccatttattaccatgcttcaagagccattccttttggaacaatggcaagaaagttcaccgtatgggactttctcaggtatttcatcttcacgtctttctgggcatataagatctattatgtctatggcttcatgatgctggtgctggttatcctgtgcattgtgactgtctgtgtgactattgtgtgcacatattttctactaaatgcagaagattaccggtggatgtatggcttatttcaaacatcattttactttggatatatggcggtatttagcacagccttggggataatgtgtggagcgattggttacatgggaacaagtgcctttgtccgaaaaatctatactaatgtgaaaattgactag

SEQ ID NO: 1583 - DNA, 639 bp, Homo sapiens
atgtctggggatgcgaccaggaccctggggaaaggaagccagcccccagggccagtcccggaggggctgatccgcatctacagcatgaggttctgcccctattctcacaggacccgcctcgtcctcaaggccaaagacatcagacatgaagtggtcaacattaacctgagaaacaagcctgaatggtactatacaaagcacccttttggccacattcctgtcctggagaccagccaatgtcaactgatctatgaatctgttattgcttgtgagtacctggatgatgcttatccaggaaggaagctgtttccatatgacccttatgaacgagctcgccaaaagatgttattggagctattttgtaaggtcccacatttgaccaaggagtgcctggtagcgttgagatgtgggagagaatgcactaatctgaaggcagccctgcgtcaggaattcagcaacctggaagagggcgcacttcaaaacgctgacgttctccttcgtccctctgggggcgcccgaggggccctcgcagaagatgaggtgcctttccagccaggcttctcgcgtgcagggcttgggaacagtgcatccccatcctaccaagcagtcccttcctcttcatttgcatcgcgtccgtag

SEQ ID NO: 1584 - DNA, 1053 bp, Homo sapiens
  misc_feature 1: n = A,T,C or G
nggcatgactccccagaccccttagacaggaatttggacaagataaaaaaaaatcagcgtttagtcctcacactggcctcatatgaaaaccagaaaactagaaaatacacgaagccgctactgtcagatactgaacaggaggtccaggcccgtaatcctcgagaggggacacaaacgacccgacagagtgagcgaacaacgtcaaagggcctcaagtttggccgccgactaataatactaatagaacttcctgcttctggtacatcaaaaagcaagacaaaactaaagcagtccctgccgccaccgtccacgctctgcgttgtagagaagacagtgggtcggaagagcgccatcgccgccagtgtatgtggggccctttttatcaggtactgcatctacttttaccacaaaagacgaagtgaccccaatttcaagaacaggcttcgagaacgaagaaagaaacagaagcttcccaaggagagagctgggttttccaagttacctgaccttaaagatgctgacgctgttcagaaattcttccttgaagaaacacagcttggtgaagagttactagctcaaggtaaatatgagaagggtgtagaccatctgacaaatgcaattgctgtgtgtggacagccacagcagttactgcaggtcttacagcaaactcttccaccaccagtgttccagatgcctctgactaagctcccaacaattagagaatttaacgtgcttagagcttgtctgaagatgatgtggaatgagatacaaatgtcaaacataataaaatctcaaggaaagagcaacaccttagtaacactgacatctcaagctgctcctcactcacagccaagggaggaacatcagggaagggtcccatttgattggctctgctcagttactgctgccattatgaagtgtgcagctgatgaggcagtatccactccagaccttttggagcctgctttattggtggaaacgtgtggttataggaacattatccagagtgtggaaactctaatgcccatcaccttctggggcaaagaaatgtag

SEQ ID NO: 1585 - DNA, 300 bp, Homo sapiens
atgattatacctccaatgttcggtgcagttcagagtgttagagacggtctggaaaagcggtacattgcttcttatttagcactcacagtggtaggaatgggatcctggtgcttccacatgactctgaaatatgaaatgcaggtgagagtgacttctacatggcagagtggcccagtgcaggatctgagagcacaagcagagtcgagaggctgtctaagtggaggtgcagcagcagcccagcaccaagtgttggagcctgaattgagtgagaagggcattgcttgggaaaaggagaggtag

SEQ ID NO: 1586 - DNA, 960 bp, Homo sapiens
atgaccctcgccgtcagccggatccgtgcggtccgcgaggacccgggggagggcggttaccgaggcccgccaccgccggaagggtcatttcttcagatagctccccagctgtggaaaatgagcatcctcaaggtgaagaaagctttttttgctttggtgactaacggtgtacgagctgcccctttatgggatagtaagaagcaaagttttgtgggcatgctgaccatcactgatttcatcaatatcctgcaccgctactataaatcagccttggtacagatctatgagctagaagaacacaagatagaaacttggagagaggtgtatctccaggactcctttaaaccgcttgtctgcatttctcctaatgccagcttgtttgatgctgtctcttcattaattcggaacaagatccacaggctgccagttattgacccagaatcaggcaatactttgtacatcctcacccacaagcgcattctgaagttcctcaaattgtttatcactgagttccccaagccagagttcatgtccaagtctctggaagagctacagattggcacctatgccaatattgctatggttcgcactaccacccccgtctatgtggctctggggatttttgtacagcatcgagtctcagccctgccagtggtggatgagaaggggcgtgtggtggacatctactccaagtttgatgttatcaatctggcagcagaaaagacctacaacaacctagatgtatctgtgactaaagccttgcaacatcgatcacattactttgagggtgttctcaagtgctacctgcatgagactctggagaccatcatcaacaggctagtggaagcagaggttcaccgacttgtagtggtggatgaaaatgatgtggtcaagggaattgtatcactgtctgacatcctgcaggccctggtgctcacaggtggagagaagaagccctga

SEQ ID NO: 1587 - DNA, 960 bp, Homo sapiens; identical to SEQ ID NO: 1586

SEQ ID NO: 1588 - DNA, 177 bp, Homo sapiens
atggaggcacgctggcagctggcagctggagaccacggacagaggggttgtgggggtgaaggaagaggagatgatcataagctgcagagtccacagggagttgggtcaccattacattcagtacatccccagggccaagtacagcagaagtcaatgactgtttcacagctgaattga

SEQ ID NO: 1589 - DNA, 843 bp, Homo sapiens
atgagcacacacgcaggtggcagaaataagaaagcacggaccatgcccaaggcaggcggcaatgaggaaggcacaacagcaggggggcatcaccagctggtgcgggttaccaggcatccagtctatccatcacatgcatccattcctggagacaccatcagagcattcagctcgacgtggacactcagcacccaatttgcctgggtcacagaggaggtacctgctgtggtagcccctctgtcaccaactggaagaaataatgaaaacaaaaataaaatgtggaaatacaggaaatgggagaggcacctgcgggtcaaatgcagccccacaggaagctttcctggtggtgtccctcattcgaaagatgggggggaactccaatttgcacgggttcttcaggccccatccagaacactccttaaagcacgatgtggacaggaagagtgcttatttggttgttttaatataaatcattttagagactggcccaaatgttgcaaagggttcacaagacacaggtctttgatctctgtggctttgccatgtgggaaaataaataaatacccagtggtcaaattcaaaacaagaagaatgtgccagcttgttcctgtggcagctgtaacccagaaacttgaccctgttacagagaagcatgagggcaagctgtgtagggggaacaaatattcatctcctaagagctatattgcacaagcttttcatgcctattatgggaaaatcaggcttctgcacgacatcaaagtccttgcagaccatgaccttaactgtgttctcaccagcattcaaaacctggttgcattaaataatactggtggaggctcataa

SEQ ID NO: 1590 - DNA, 2094 bp, Homo sapiens
  misc_feature 1, 2: n = A,T,C or G
nnccatctgctggactttttccacttggatatcccactggcacttgagctgaacatatctagaacagaacccatcattccttctgctcagctcacatctcctgctggtgatttctcatcattagtggtaccagttggttcctgtgcccctgagccacagccgggacaattcctgcacacagcaggttccttggccaacagcgctgaattggattcagcaattgttgaactgtttcttcttctggagtgggtataccctgattatttcacagcttttcaaggttttgttgttcatgaatcgaaacacccatctgaaagatgttattgcaagtccctctgcaagaatttattgaatgttcttgttgttggagagctgtgggtcctcacaactctagatgtttccaggtataacaaaaatgtgaaatcttccgccacctttgaagactttcagattcgtccccacgctctctttgttcattcatacagagctccagctttctgtgatcactgtggagaaatgctgtgggggctggtacgtcaaggtcttaaatgtgaagggtgtggtctgaattaccataagagatgtgcatttaaaatacccaacaattgcagcggtgtgaggcggagaaggctctcaaacgtttccctcactggggtcagcaccatccgcacatcatctgctgaactctctacaagtgcccctgatgagccccttctgaggagacctgggaaacttggtgccaatgggagagcttcagccctgaaggggataggccctcccatgtcccggtgcccttccagacagtgcaacggaaccagtaaaggggattcctggatggcatcaggagcactgcacagacatctgaaccgtgagacaggacacgagagtggctcgctaagtcagctcggaaaagaaaaccggaggtggcgagagtggctcaccaccccaactaggaaactggaagtggcgagagtggctcgctaccccaaccaggaaagggagctggaagcagggaagtgtatgagtgtgtgtgataaagactgttccagaaggaagcaacagtcgtttattggtcgagagaagaggtcaaattctcaatcatacattggacgaccaattcaccttgacaagattttgatgtctaaagttaaagtgccgcacacatttgtcatccactcctacacccggcccacagtgtgccagtactgcaagaagcttctgaaggggcttttcaggcagggcttgcagtgcaaagatttgcttagccctggggcagagtctgatgtggtcatggaagaagggagtgatgacaatgatagtgaaaggaacagtgggctcatggatgatatggaagaagcaatggtccaagatgcagagatggcaatggcagagtgccagaacgacagtggcgagatgcaagatccagacccagaccacgaggacgccaacagaaccatcagtccatcaacaagcaacaatatcccactcatgagggtagtgcagtctgtcaaacacacgaagaggaaaagcagcacagtcatgaaagaaggatggatggtccactacaccagcaaggacacgctggaaattcctttatctgaaattttgtctctggaaccagtaaaaacttcagctttaattcctaatggggccaatcctcattgtttcgaaatcactacggcaaatgtagtgtattatgtgggagaaaatgtggtcaatccttccagcccatcaccaaataacagtgttctcaccagtggcgttggtgcagatgtggccaggatgtgggagatagccatccagcatgcccttatgcccgtcattcccaagggctcctccgtgggtacaggaaccaacttgcacaagaagaagaagaaaggagaaggacatgaagaggaagaggaagagaaagagcaagaagaaaaagaagagggagaagaagaagaagcagaagaagaaggagaaggagaagaagaagaagaggaggaggaagaggaaaaggaagaaggagaaggagaaggaagaaggaagaagaagaaatctagccagcttcagcttgacatggaatgcaagtcttgttatttgcaaatctga

SEQ ID NO: 1591 - DNA, 396 bp, Homo sapiens
aacttgcctctgctgccttatgaactgggtaaaggcgatcagggccctggtgttctcagtggtgccatgctcaaggtagagcctccattcttgtgtgacttccttggagagaagattgcatctgttttgggtatcagcaccccaaagtaccaatatgccattgatgaatattatcggatgaagaaggaggaagaagaagaagaagaagaaaacaggatgtctgaagaagcagaaaaacaatatcaacagaataaattgcagactgattccattgttcagacagatcaaccagagacagtgatatccagctcatttgtgaatgtcaattttgaaatggagggagacagtgaagtaattatggaaagcaagcaaaatccagtctctgtcccaccataa

SEQ ID NO: 1592 - DNA, 168 bp, Homo sapiens
atgaaacccaaccacgtcttcaatgggaaagacgttcccattgaaaatcttactgggacacccagtttttcttactggaatgaatctgaacacagagttgaaataaaccacagggattatctggacccatccatctgtgatgttatttcagatgctgcctctccttga

SEQ ID NO: 1593 - DNA, 825 bp, Homo sapiens
  misc_feature 1, 2: n = A,T,C or G
nngtgcacattcaggttcccgagcacaaacatcaagataacgttcactgccctgtccagcgagaagagagagaagcaggaggcgtctgagtctccagtgaaggccgtacagccacacatctcgcccctgaccatcaacattccagacaccatggcccacctcatcagccctctgccctcccccacgggaaccatcagacaacagctggggatcttagtgcagatggcagggtcaggctctctggaggtctcacgggtggtggcagtggaaagtgcacagccctcctgtgccgatgcatcgagacgcaaccgctcctcggaggagccgcgagtaaggcgagtgtccaacgccgagctggctgacagagcccggccgcggcctccgcgggcccaggggcctccaggccccgtgaccaccggaccgagcaccctggaacggccccagcttggcctcgggacagtccgcgcgctcaccgactccctggtgaacgccgcttggccgccgccgccgccgcaggacccacgagaagcggaaaccggcgcaaggacccggtccccgcggcgcctccgagtaaacagcggtcgtggcgggaatgatcagaagcgtttcgagagggttttaggcgttttcgaacctgcccctctgagggtcaccgagcagccggtgcaggggcggaagcgggtgacggctgctgaccggcgccttccgcggttgtctccatgccatggcaacaaccgcgcagcgcacgcaggggggttttgtagctgttattgccggaatgggctcctgtggatgctgctctgtggctggcacttctgcgcgtga

SEQ ID NO: 1594 - DNA, 4755 bp, Homo sapiens
  misc_feature 1, 2: n = A,T,C or G
nnagccaggaaaaaggactctgagacgtacatgctgttggcatcagttaaatttcatgttcctagaggtcctacaatcctgtatgtaaagctacattgctacatcagcagtcccaggaacttggcctacggcctaggcatggcgtatgagctctatggtagtagaaggtcagacccaggattggaggaggggcagctgagtagaggggaagatgaatctcggatgcctctgggccagtgcttcataaagtcctgtgctcagattccagctgtggaacagagactggccatggaagggaaaggcctgtccgacaacaggacctctgagatggacccgaagcacttcagcccttgtcctggctgggctgagtcaagccgggagaaccagacagttcctggtgtttggggcctggaccaggaaaatgcagctcatggcaacatggagggcttcattgacggccacttccctccaaggattcagggaccattcatcaccgtggtgcctagtccccaggaggtcagtggcctgctgcggtgctcagctgctgaaataatagtaaagacttttgaagagaacagaagtgagagggcaggaatggtgactgactatggaatagctccgggtgagggtgaggaggaggaaaaggggttccatcctacgttcgtcctcggcgctcacctcctccaagcttacctgcagggctttgctgcacttatccatgaagaccgcaagacgccgcttacctgctcagtcttcgagcagctgtccctgattatgaagttcagacatagcgactggtgcacaatagacatctgttttgtctgttgtggaattggtgactctaggtgctatgtgaaggctgcaagactaggacatgaggctgaaagtcagagaagtccctgtgagacgagggccctgagcaagcactggccagactgtagcaaggccactcaccaggccaccccgctggttctacttccgcacccacctctggcagccatgatgcttctgcagcatgccagtttgttcactgagaccttcacagaaggtcgcacaaccaccctggacggtacctttgacaggagcgtgaccctgctggaggtgtgcgggagctggcctgagggcttcgggctgcggcacatgtcctccatggagcacacggaggagggcctccgggagcgacttgccgacgccatggccgagtcacctagccgggacgtcgtgggatccggaacagggccagcattcttcagcacgcagatgccatgtgtgcctgtatgtggttctggttctctgggagggggcggggagaggggcgcctccttgccgcagtcccagggccccaagagatcagtgtacttctcaatcgttgtccatatcttttccaaaaagattcctcaatgcttttcttttcaaaagggaaaaaaaaaggaaaaaaaaaacaatgccaacagcccagcgtccgtgagcaacccaacagtaacaaagcatgcgttcgggatggaggaagaacttcagcgagagggaagcatcgagactctgagtaacagctcaggctccaccagcggcagcataccaagaaactttgatggctaccgatctccgctgcccaccaatgagagccagcccctcagcctcttcccgactggcttcccgggacctttaggaatccatgtgacctaccgattctctcggcactacctggtcaacgggcagctttactacggacttcctctcaatttgatgaaggaaaaataccttcatgatctggaaagaggccgggatggggagggcggaggcggcacagctggagcccggattgtggcacgccgtcaccgtgctgctccggggaatcccgacccgctccctgcgaaagcgtttccgaacgcgaacccagagcctgtgaacgcgccggcaagccccccactcccccaccgccgcccgtcgcagacatccataaccacgatctcgcctccatgcacatccaacgcacgacggtgcacagacgtgcacctgacttctgcggaccaggtgtctcaagcgtacagcggccacccgcggaaccgcggcccggggccaaaaacgaccttcaggaatcagcctgagtgttcgcgcccgagcccgattggaagcaggagacgtgcgcttccgagagatgagaagaaactaaaaaagtggttggcagggcgaagagaggaagccggtatttcggaagaaggagactttcgtctccggtaccggatagggcgaaaattcgttgggtcgcgggtggagaatccggggtccgcccgcgcggtgccgccctgtgctcagcgaaagagccgggtgccccttgcggtgcgccggacgggaagccccgaggagcagctgctgcgcccgccacccgggtcgtccgtccaccgcgcgcgccgccgcccgggccgggggtccgagccgcgcgcccccggccccggccccggcccccgggcgcctgggccggatgtcccgatgagagagccggcgctggcggccagcgccatggcttaccacccgttccacgcgccacggcccgccgacttccccatgtccgcctttctggcggcggcgcagccctccttcttcccggcactcgcgctgccgcccggcgcgctggccaagccgctgcccgacccgggcctggcgggggcggcggccgcggcggcggcggcggcagcagcggccgaggcggggctgcacgtctcggcactgggcccgcacccgcccgccgcgcatctgcgctccctcaagagcctggagcccgaggacgaggtggaggacgaccccaaggtgacgctggaggccaaggagctgtgggaccagttccacaagctaggcacggagatggtcatcaccaagtccgggaggcggatgttcccccccttcaaggtgcgagtcagcggcctggacaagaaggccaagtatatcctgctgatggacattgtagccgctgacgattgccgctataagttccacaactcgcgctggatggtggcgggcaaggccgaccctgagatgcccaaacgcatgtacatccacccagacagcccagccacgggggagcagtggatggctaagcctgtggccttccacaagctgaagctgaccaacaacatctctgacaagcacggcttcaccatcctaaactccatgcacaagtaccagccgcgcttccacatagtgcgagccaacgacatcctgaagctgccttacagcaccttccgcacctacgtgttcccggagaccgacttcatcgccgtcactgcctaccagaatgacaaggcgggtgggtaccaagtggacgctccccgggtcttccctctgcggccagcacccgctgacctcggggtgccaccgaccacgctggaagagccacggcctgacttagcgccgcccccttggtccccgcagatcacacagctgaagatcgacaacaacccgtttgccaagggcttccgggacaccgggaacggccggcgggagaaaaggaagcagctgacgctgccgtctctacgcttgtacgaggagcactgcaaacccgagcgcgatggcgcggagtcagacgcctcgtcgtgcgaccctccccccgcgcgggaaccacccacctccccgggcgcagcgcccagtccgctgcgcctgcaccgggcccgagctgaggagaagtcgtgcgccgcggacagcgacccggagcctgagcggttgagcgaggagcgtgcgggggcgccgctaggccgcagcccggctccagacagcgccagccccactcgcttgaccgaacccgagcgcgcccgggagcggcgtagtcccgagaggggcaaggagccggccgagagcggcggggacggcccgttcggcctgaggagcctggagaaggagcgcgccgaagctcggaggaaggacgaggggcgcaaggaggcggccgagggcaaggagcagggcctggcgccgctggtggtgcagacagacagtgcgtcccccctgggcgccggacacctgcccggcctggccttttccagccacttgcacgggcagcagttctttgggccgctgggagccggccagccgctcttcctgcaccctggacagttcaccatgggccctggcgccttctccgccatgggcatgggtcacctactggcctcggtggcaggcggcggcaacggcggaggtggcgggcctgggaccgccgcggggctggacgcaggcgggctgggtcccgcggccagcgcagcaagcaccgccgcgcccttcccgttccacctctcccagcacatgctggcatctcagggaattccaatgcccactttcggaggcctcttcccctacccctacacctacatggcagcagcagccgcagccgcctcggctttgcccgccactagtgctgcagctgccgccgccgcagccgccggctccctctcccggagccccttcctgggcagtgcccggccccgactgcgtttcagcccctatcagatcccggtcaccatcccgcctagcactagcctcctcaccaccgggctggcctctgagggctccaaggccgctggtggaaacagccgggagcctagccccctgcccgagctggctctccgcaaagtaggggccccatcccgcggtgccctgtcgcccagtggctcggccaaggaggcggccaatgaactgcagagcatccagagactggtgagtgggctggagagccagcgagccctctccccaggccgggagtcgcccaagtga

SEQ ID NO: 1595 - DNA, 258 bp, Homo sapiens
atgcccaagctggcccacaggtgccaggaaaacagaaaacacatggagctgagctggactcacttgcagcttggtgccaacatctgtcgagcccagcctaaatccaccaagtccctgcagtttgaccaaattcagttttactccatgatgatggtgtcttggagtaagaggacagtgactgctactggcatagactcagagttccaaatggaagaaaaggaagaggacaagactgtgggagattatgcaagtagctga

SEQ ID NO: 1596 - DNA, 687 bp, Homo sapiens
atggaggccgagccaatcccggactcctcaatgccagcaaagcttctggcgccgccctgtctgaacctggagcggctgggaggatccccctcccaggagaagccgaggaccccaggatgctgcagaatcagtgagagggattccaaggacacacagaccaggatcagccaaaagggccgccgtctgcagcccccggggactccctcggccccaccccagagaaggccccggaaacagctgacactgccggggcaccgagagagtggaccctgggttcgagggggtgactctgaagtttcagataaagccggactccagcctgcagatcatccccacgtacagttacaacgcaaacaccagtgtgggagcctgccctgcagtagccgttctcaggaatcccctgcagatgctgttgggggccctgcagcccacccaggaggcaccgaggcccactcagcaggcagcgaggccctggagccccggcgctgtgcttcctgtcggacccagaggaccccgctctggagagacgctgaagatgggacccctctctgcaacgcctgtgggatcaggtacaagaaatacggcactcgctgctccagctgctggctggtgcccaggaaaaatgtccagcccaagaggctatgtggcagatgtggagtgtccctggaccccattcaggaaggttaa

SEQ ID NO: 1597 - DNA, 285 bp, Homo sapiens
atgcccgtgctctgccttctccagccgagactcaagattccactcgcctcctctaaacacgcaggacgacctgaaatcatagcccttaatagagcaagtcaaccaacggtacagatggtcaagctcttgctcatgtgccctccgagcataggctacagaatggcgggcgccgtggacatggttattccgggtggactacatttcccagaagtcaccgcgctagggtcaccctcgagctctagatctttttccggtgtccgagctgctgtagcccctacgtggtga

SEQ ID NO: 1598 - DNA, 813 bp, Homo sapiens
atggcgggcgccgagaactggccgggccagcagctggagctggacgaggacgaggcgtcttgttgccgctggggcgcgcagcacgccggggcccgcgagctggctgcgctctactcgccaggcaagcgcctccaggagtggtgctctgtgatcctgtgcttcagcctcatcgcccacaacctggtccatctcctgctgctggcccgctgggaggacacacccctcgtcatactcggtgttgttgcaggggctctcattgctgacttcttgtctggcctggtacactggggtgctgacacatggggctctgtggagctgcccattgtggggaaggctttcatccgacccttccgggagcaccacattgacccgacagctatcacacggcacgacttcatcgagaccaacggggacaactgcctggtgacactgctgccgctgctaaacatggcctacaagttccgcacccacagccctgaagccctggagcagctatacccctgggagtgcttcgtcttctgcctgatcatcttcggcaccttcaccaaccagatccacaagtggtcgcacacgtactttgggctgccacgctgggtcaccctcctgcaggactggcatgtcatcctgccacgtaaacaccatcgcatccaccacgtctcaccccacgagacctacttctgcatcaccacaggctggctcaactaccctctggagaagataggcttctggcgacgcctggaggacctcatccagggcctgacgggcgagaagcctcgggcagatgacatgaaatgggcccagaagatcaaataa

SEQ ID NO: 1599 - DNA, 3591 bp, Homo sapiens
atgagatccgggaggcacccctcgctgctgctgcttctagtgctgctgctgtggctgctgcaggtcagtatcattgacagtgttcaacaggaaacagatgatcttactaagcaaacaaagtgtcactataagttccaggaaaagatctaccagcctctacggcgatccaagagaagatgggttatcaccaccttggagctggaggaggaagacccgggaccctttcccaaactcattggtgagctgttcaataatatgtcttataacatgtcactaatgtatctaatcagtggacctggtgtggatgaatatccagagattggtttgttttctctagaagatcatgagaacggaaggatatatgttcaccgccctgtcgatcgagaaatgacaccatctttcacggtttattttgatgttgtggagcgctcaacaggaaaaattgtggatacatccttgattttcaacattaggatcagtgatgtgaatgatcatgcaccccagtttccagagaaggaatttaacatcactgtgcaagaaaaccaatctgcagggcaacctatttttcagatgttagcagtcgatttggatgaagaaaacactccaaattctcaagtcctttacttcctcatttctcaaacaccattactgaaagaaagtggtttccgggttgatcgccttagtggagaaatacgactctctggctgcttagattatgagaccgctcctcagtttacactgctaatcagagccagggactgtggagaaccgtcactgtcatccacgaccaccgttcacgtggatgtgcaagaaggcaacaaccacaggcctgcatttacccaggagaactataaggttcagattcctgaaggccgagccagccagggcgtgttgcgtctcctggttcaagatcgagattctccatttacatcagcttggagagcaaaattcaacatattgcatggcaatgaagaggggcattttgacatttcgactgaccctgagaccaacgaagggatattaaatgttatcaagcctttggattatgagactcgcccagcgcaaagcctcatcattgtcgtggagaatgaggagaggctcgtcttctgtgagagaggaaagcttcagccgccaaggaaggcagcagccagcgccactgtgagtgtgcaggtgacagacgccaacgacccaccagcctttcacccccagagcttcattgtcaataaagaggagggcgccaggcctgggaccctgttgggaacttttaatgccatggatccagacagccagataagatatgaactggttcatgacccagcaaattgggtcagcgtcgacaaaaactccggagtggtcatcaccgtggagccaattgaccgagaatcccctcatgtaaataacagtttttatgtaatcatcattcacgctgttgatgatggcttcccaccgcagactgctacagggaccctaatgctcttcctgtctgacatcaatgacaacgtcccgactctccggccacgttcccgctacatggaggtctgtgagtctgctgtgcatgagcccctccacatcgaggcagaggatccggacctggagccgttctctgacccatttacatttgaattggacaatacctggggaaatgcggaggacacatggaagttggggagaaattggggaaactctcctcatcagggggtaggaggctgctgggagtccctgagacatattcttgcatctggcaagaagggtgtttccagggaagctccaggattgacgtcactgtttggcctgggtcaatcagttgaacttttaaccttgagaagcctgccacgtggtaattacttggtgccactcttcattggagacaaacagggactttcccagaagcaaactgtccatgtaaggatctgcccctgtgccagtgggctcacatgtgtggagcttgcagatgcagaagtggggcttcatgtgggggccctgttccctgtctgtgcagcatttgtggctctggcagtggctctgctttttctgttgcgatgctattttgtgcttgaacctaagaggcatggatgctctgtatccaatgatgaaggccaccaaacactggtcatgtataatgcggagagcaaaggcacttcagcccagacatggtcagatgttgaaggccagaggccggctctgctcatctgcacagctgcagcaggacccacgcagggagttaaggatctcgaggaagtgcctccatctgcagcgagtcagtcagcccaagcacgctgtgctctggggagctgggcttacccagatgccacaatgcacagacaactcctggctccggtggaaggaaggatggcagagacattgaatcaggagagttggggcagctctgctacactctcgggtgaagctctgtgcagaccagatcatgtctctacagaaaacgtagcatgtggtgatcatcacgtagtatccagcttacccattttcacatttgcgcacacacacgtgaacgcatgcacatgcacacataccgctcatgccaagtggactgtgtggacagtatcgcagaaactccatgttgccaatgtgctggaagatgaccccggctacctacctcacgtctacagcgaggaaggggagtgtggaggggccccatccctcagctctctggccagcttggaacaggagttgcaacctgatttgctggactctttgggttcaaaagcgactccgtttgaggaaatatattcagagtcagcacctatagtcaacaacgtagcatctatagtcaacaacatagcacctatagtcaacaacgtagcacctatagtcaacaacgtagcatctatagtcaacaacgtagcacctatagtcaacaacgtagcacctatagtcaacaacatagcacctatagtcaacaactctaaagagagaaatcgcttcagcctcagcaggggctgcatcatcccccagggaagagccacagctgggcgaggattgccacaagacatttacaaggagatgatgccacggagactaacgcagactggtaaacggaaacacggggctttggctcgaacaccctctttcaagaaagttgtttatgaccacaaggaagtgtctctcatctgttgggtacaaacatccccagaagatcccccgccacacattccctggatcagaacccatcagtggttccctagtgcctgggaatttccattcaatggcctccgaaccatgagcctgccttttctgcctgaagcccaaaaccccagctacagatctttaccccagagaccatcttgggcctccctccaggcttttgcttactctgtgccctcatcctggagtcctgtccccacccctatctacagaaactccaccagccctcctggctgccccgatggtcctcgcacagggagacttgtctacctcccgaggtcacgtgtgggctctggtcctcttgccatcatggcagagattttgctgtatctccccctggctgctggtgctctgcttacctcctccagagttgttaacaaagagctgaggatgctgagctgcccagggacttggctgcaggtggcatag

SEQ ID NO: 1600 - DNA, 1407 bp, Homo sapiens
atgggccttctggtgtcaaaatattttagattgcagaggaaagggatgagaataaaatccatggttatcagagatgatttctaccaacagggaaattcacccaaattgcacaaacagcaatcagattgtaaagcctacgtggtgggcggcaggccgaccgccctgggggccctgcacctctgggtaggtgaccgcgcccaggtatcgagcacaggtaacgcgccccggctccgagtctcggggtctcagccactgaatccccagcgaggcctgacgccccccggtggaggcgagcagtctgagtgctgggtccggaacagacctgtcctgcggaactccgagtgcgcgttcggtttccgggggaggagggcggagaaggacttgcgcgcgacggttctcaccgctgctatggaggcgctggccatgggttcccgggcgctgcggctctggctggtcgcacccggtggcgggatcaaatggagatttatagcaacatcgtcagcttctcagctgtcaccgacagaattgacagaaatgcggaatgatctctttaataaagagaaagccaggcagttatcattaactccccgaactgagaagatagaagttaagcatgttgggaaaactgaccccggtactgtcttcgtgatgaataaaaacatttcaactccctacagttgtgccatgctaatttctggtgccttctgttatgacgtagttttggatagcaaacttgatgagtggatgccaacaaaagagaacttacgttccttcacaaaagatgctcatgctttaatttataaagatcttccatttgaaactctggaagttgaagcaaaagtggcattggaaatatttcaacacagcaagtacaaagtagatttcatagaagagaaggcatctcagaaccctgagagaatagtcaagctacacagaataggtgacttcattgatgtgagtgagggccctcttattccaagaacaagtatttgtttccagtatgaagtatcagcagttcacaatcttcaacccacccagccaagtctcatacgaagattccagggcgtgtctttacctgttcacttaagaatagaattccttaccattagagccatctccattgggtgggagagccaaggtgacagactcattctgtggaataagcagaagcaggacgacagccagctggagtctgactgcagggactcgcttcctcaacaccctgacctcacactggctcagcggaagggagcccgagaggagcaagtgggaggtttttcctcctggaccgaatcagctggagaccagcaggtccctaagagaggaagaaatggtcttcaggcgatcctggatttcatccctacctcatcacccttcaagagcccgcgtttggtttggaatacgtaa

SEQ ID NO: 1601 - DNA, 435 bp, Homo sapiens
atgcctgctaaacagaaaggaaaatttgaagatatggcaaaggtggacaacgcccattacgaaagagaaatgaaaacctacatccctcctaaaggggagataaaaaaagagtatcgcccaaaaatcaaaggagaacatcctggcctgtccattggtgatgttgcaaagaaactggaagagatgtggaatgacattgctgcagatggcaagcagccttctgaaaagaaggctgcaaagctgaaggaaaaatatgaaaaggatattgctgcatatcaagctaaaggaaagcctgatgcagcaaaaaagggagttgtcaaggctgaaaaaagcaagaaaaagaaggaagaggaggaagatgaggaagacgaagaggatgaggaggaggaggaagatgaagaagatgaagatgaagaacaaggtgatgatgatgaataa

SEQ ID NO: 1602 - DNA, 1137 bp, Homo sapiens
atgctcccactggtcaccagtgtccgcggggcgaccccacattgtgaccagagcaggcctgtggctgtgctcaaggcggaagcgttcatagctttcctagtgggggccctgcgggatgcccaggccgcgctcctttcccttgctcacctggccctgaactgcctgaaactcggtcccacgaatggcaggcagcgtccaaaattcaaccccgtaaagccagcaccagccaataaagcgcacggatggaggccacgtgacagcagtgggccggccctccggctgagccctgatctctatggtttccgcggctcgctagaaggagtgtggtccaccggaggactccctacattcttcctccattacctcactgcctccggtggctgctgggataccggaggactcggcgcgtccggcccgcccgcaggccagcttctctcgggagcccccacccaggcgcatggctccatgaagcaagaggaggaggcagagcgcgagaggtcccgtccgccccagccgcgtctgggccaggataaaaggtgggaaactcgggctgcgccgcacccttctccccgctgccgggccaggcctccctcgcaaaaccatattcctgctgctgtcagttatgatgcactgagaaaacttcagagacctaaactttttccagagaagagaagctttactggtgttccagccctaagaccatggagagaggaattggaagccccagaattgattgggtcagaaattgaaaatgatactatcagtgacccaggtttgaatgtctctctccacagcattgacttcactaatggatgtgacctggttggcagcagtagcttgcacaacatgcttgtttgcagctcatatgacattaacagacaagacacttttcagaaagacaggctacgcatgcccagtcagcatttgcccagtcggatttgcacaggcagggccatcacaccccatcagccaggacctcacaaccggatgccagaggccagctcagcacctcagagacgactcagttcactcccaccaaccccacctcaccccatttcacaaatggtcacactgacaaccagagagagggttgtggcatgccaaggactcttgatccagtcccacctgctggtgtag

SEQ ID NO: 1603 - DNA, 801 bp, Homo sapiens
atggagatacgcgggaagtggagctttgcagagcatacttcattttccttgagaaatgcagcctatttaattggagattctgtggttctcctgtgtagtgaaggtaagcagagaagatggcaagtggctggtaacctaggggaaaagggaggtttgggcggcagtctcagtgatcaagaactagatctggagagattggcaggtggaagaataaagatcatccaggagtgcagatttgcagagtatcaacttgaactaacagatgactacatcattagaattaatcgactgaagatgaaaggaagaataaaagtgatgtttggatgcgaattcaactttgtggcagacgagtcattcaatgtatgccagaacaaaattcacatcgccaagggagagcgagaagaaggaaagaagaagggagggtgggaaaaagaaaggaaagaaggaagccccttgaagagccacaaggaatctgtttggaatcttcataatgaaaacttggtggagtttctggaggtaaggtccattagagttacggctcccctaaagagagttgactccagaagttccttactctcatgctattccagtcagcctctagtaattgcgcaaacttcccatggacatgtttccctaccaattaaggattatgtgtcttctgctccagggatctatgaggaagaattgcctatgtcatcaataggaagcactgaggactccacaaaactcccggttctcaggtttgctacagagggagcagaaggccactgggatgttgggttcatatacgtgaaatcataa

SEQ ID NO: 1604 - DNA, 1584 bp, Homo sapiens
atgcagaaaagaatacatgcagggaaagcccagagcagtttggtgtcatcccttccacagtggaagctgacaaatgacttcatggtcctgcatgctgatgaaactactgacttagctggtctgaagaacctcactgatgccagctggtctgaaggactccccaaagagctggattctcagttaatgcagtttccacatcctgattatttcatcccacttaccctgaccaatgaaaaaccccaatttttcagccctttaccctccataatccccttaaaaccccagtccagaactcctcaaggagatagatttgaggaagccaatcatcaacctcctattgaggaggaagaaatgagaggcctgagaaggaaagtgcatcaaactccccttactaacatcatacctgtcaggaaggaagcagatgagggctgtggggagagcgcatccatcttttgtccacggcaattctgctggaaaccccagagggttaacccacaggagccccttggttgggaatttacttccatctgtaggctagagaaaaggtcagctcccattgacatcaacggaaaggcaggcctatggactgtgctcccaggctaccaacagcagagagttgtttctggagaaagtggagatggagaccaagcacttggagatctaaatcaagtgtccccaggagctcagttgagcgacaaagctgagcagaaagcccagactgcgggcgcggcaggaccacggagagcgccgccgccaaggcctgggcggggcctgagctcgggttcccggggcaatgctcgtctccgtcagcaacccccagggggcgctcgcgcggaggtttcggaaccagtctcttgccgggttgctgggtgcatgggattcgtcagagtaccctcctctttactctccgagttaactgagagccgacctgacatctccaacattttcaccctcttcccccacccccatcaccgagaatggagtcagggtttccggagagaccgaactctgctctcagcacctttcccagccgctgttgctaaactgacctcggaggacgagaggggaaggaggtgggctttaaggccctatttcccattctatgttccaaatctgacggcgccccagggcgccttggcggattgcctttcagccccagaacctgctaggctccagggaaagtcacaggcggcagagatgatccaaggggcgcaaatctatgaagggcttgatgtgggtggttgggaagtggaggggggaaagaaaagaatacatgcagggaaagcccagagcagtttggtgtcatcccttccacagtggaagctgacaaatgacttcatggcgaccctagcccttacctcggtcactaggaaagtcagggtgcttgttccctgcccttctcagaaacaggatcttggagagagagagatgaggagtggggggaaggctctgagagggtgctccattcctggctgtaggtatattcccagggccttccagcctgcagctattgaaggaggggctttctttacagagctgcagacatgtcttccaagactcttcactggcagctgccactcttag

SEQ ID NO: 1605 - DNA, 816 bp, Homo sapiens
atggtggttggagaactaggcaaattgttccacaatgcgtgtaataaagaggattcgatggctctgaaagaacagaaagaaaaaggcagagacaacatgcaaagggccttgtactgcactacagtgaagtatggcagagagccactaaagactacttctgaaagtgctgaaaacttagtagatgggcctattgatctgaccccatcactctgtacgggccactgtgcagagggctggccagcagaatttctaggtattgttccttctggaacacatttttatcattttgctcaggccacggccactgctactagcatgggtgctgctactattgcccactctggagagctgctcacaggacaattacccctcagaatactgcgaatcaggataactacctctgaagaagctggtactccctggcagcccattagctatcccattccgacacactcaccgcttacccccgctcctaacttgccagcttgcattcctgacttcagcttctctcttccactcactggcccagacattgccttttctcatgggggttttccccatggtgcattaactcctcaacctttccagattccgcatgtgggacaccaagtgggtctcatggattcacacacctcaaatgcaagagggaagccaagagtgggaggtgagtggcatccagtgcgggcaggaggccgcatacattattcaggcatttccaagggatcctacatttgggatgatcattttgtgtcagagttttggttggttgggagcatagaagaggctcctctacctcaggctggaactgagagctaa

SEQ ID NO: 1606 - DNA, 1320 bp, Homo sapiens
atgcccggctggcggggcgcgcggcgggtgcgggtggcgtggaggccttggggctgggggggtgtgggcggaactgttctggctcagggtgtaaagcaaatgtttgtggagctgctttttccaagaatggaaaaagctttttctcactctaaccaggacggtttttttattgatactcgaacacttcataacatattacctaacaccaactactattaccatgacacacctgcacttcggcatgtgtcacgctttcgcctggtgccgtgctctcgagctcgtaaaacatttccatgtagacacatcccactaaccttctaccgtcctaaccgtcagagaaccaaaacccaaccgccttaccttcccgtcattgataaccatcttatctctctagacccttggacaagaacctgtaacctgccagattgcaggcacgaaaagagcggcaacatgtgcaggcacgaagagagcggcaacatgtacccgttccaggtgggatctgtgattgctggcatctcttttagttttcgggtgccattgcattcccctcatcttgacgctggcgcccaacgtggatgctggttgcagcacacccagctcagctgcgtgctaagcgtggagccatggcaggggcggaatcccagcgagcaagagctgagtgcagcctgccaggtcgagtgggcgaagccttccctcttcatgggtggaattcgcactcacattcctgggcagcacttgcaagggcgctgggaccctggttgtctctcaagcttgtctgatcctagaaatcctcgtttcaggcaggtcctgacctcacttctgctcctacaagagatgccttgtgaatatgtccccattaaagtccaggtccccttttctctacaggacgacaatatgttacttttgaatcaaaccctgactactgctgagaaggaggttgccctgcaagcagcagagaagtttggggatgagttttttatctcatatagtgccaaggaaggggatgagccttatccaattggaagaacagcagtaccattggaggaccctacatgggaccccgatgatgaaatgggagaatggaagaggaaacactttcagaaaaataatttcaactgtaccagaagagcccagtgcccagaaaccaatatcagttctatacagatacaaggtgatgctgattatttcatcaaccatcttggagttcccatcgtgcagtttgcttacgaggacatcaaaacattagaggcaaaccccattgactaccactggtttgaagacttccagcagttcagggatgattttgaacaatccaaatga

SEQ ID NO: 1607 - DNA, 312 bp, Homo sapiens
gtcacagagccacagaggctgaggctgtggcagaatcaccgaggcttccctaaggagcgggagcagagcgatgaggccctaaccgagctctggctggagctacaagcaaaagccgcgccagatcccggatgccgcaccctcctctctgctgcgcgcctcattcggcagttgtcaatccagcgctctaattggatagagctaaggaaggccgtaagtgtgagttgtccagatccttggcattttgaacaaagaattgaacaaaacgcagaaagtaacagaggaacaaaacaccggaagaagcagcaaaagtag

SEQ ID NO: 1608 - DNA, 690 bp, Homo sapiens
atgggttcagagaagctccagcttaggcacatggtggaggaagatttacggacagaaaaaggaaagggatgtacaggaaacagaagcgaggcacagaaagagccaggctggttactgctggatgattgccttgtttgttcatggtttgaagaactgcccgcctttggccggaactgggtgattgacacaagagtaggcagccgaagttttgtggccatggggatgctgacaaagattgcttgggatgcacacaaggcagcggcgaagcctgaggggtgctgccaggccgggctctccactggccacggcgctacgggctcttcccctgatttccccacacaggaaggaagtaggggagactcaggtggggcggttcttggaggcccattttcagtccaggtaaggacgcaggccctgggagatcctggttcaacagtgactgtcttatgtaacagagtcattctctttatgaccaccttaggaaccgctaaggaacataataagaaatacacagaactgattgtggaactgctctttctccctgcgattcagaggggaaaagataaagccacacagccctggggcctcttgcttaagaacacatctcagtttaaccaccaaggccgttatgataacaaatgtcagtatggaggtgtgaacatcaggggctattcaaggacgcttctctga

SEQ ID NO: 1609 - DNA, 501 bp, Homo sapiens
atgaggcgggaaagagtttcaggtcaactccaaggccaggaccagcttccagagatacaaccaggggccagactccagggctgcgtagatcctggaacaaaaggccatggtggtgaccgggccgttagaggtcatgggatagagagggaggtagccattcttttctcaggccgtggtcccacagtgtctataatagtcctcttgaggcctaagctggaaacaccactgtctgataaacactggccacaccaacgacatggtaggccagggggtgatagcaatcttccagtaaatcagcttttcagtctaaacataccagtcatcctacttgaaagaaatgtgtccctggggacaacctacaactcagaagaacacacgggttctcctattctctatggcccagtctgtgtccagcatggcaggcaaaaaggcctggaatctcatgttgttgtgactggagcctgttgctggcacaaaatcaactatacagatctatgttga

SEQ ID NO: 1610 - DNA, 177 bp, Homo sapiens
atgagacctgagacaatcaccattcagcattgcgttgcaccacctttccactgccagtcaaaaggtacacttgaaattggagggaacacaagtcaagccttccaagtacttacatggctagcagcacaagcaaggcctaaaactgcagcccaccaagcagccagcaggagaatgtga

SEQ ID NO: 1611 - DNA, 582 bp, Homo sapiens
atggcagtagaggaggaagatccaggtttcttgatctgttccctgtcccccttaatcctaacagcttcagagcagcctctgtccaagctctgtcctcctgctccccaaacagatgccctgtggccatttctcaggcctaggactggtgaccgtagttcccacgcagctggtgaccttagtgcccacgcagctggtgaccttagttcccatgcagctggtgaccttagttcccatgcagctggtgactttagtcgtcatgcagctggtgagcttagtccctatgcagctggtgatcttagttcccatgcagctggtgaccttagttcctatgcagctgatgtgaaaggctacattacttaccccacggcctatgatgccagctggaaagcttttcctccaaaacagtcagacaagatgattgtaaagaaaatgagtgacaggtctacactgcacgcaggcaaacctgtggagtctatatgcatatcagatattacaggaaaccacttatgcagctttagtcatagtgttgacagattgcttctgctcaacttgagacacattgaactatgcaatatacactga

SEQ ID NO: 1612 - DNA, 870 bp, Homo sapiens
atgggctctgaaattgcagccacaagtctacagaacacatttttcatagcccaagagggtcaggcttggagaccacatatggtcagctcaacactcaagtccaccaagcagcccatgaggaactcttccttccagagttgtgcacaccatgcagtgtggtccacctgcagaagcacacaacaggcgctgcctgggccagagaccccagtgactcacgctcctcctgctcctcctgttgctggcctctctgttgtggttgccagcgctactttgcagacgctgcctgctccctgcacgccaacacagattctgtttccctgcgaccgctgctgctgttgtttgttccgtccctggtttattgtaggagagctgattgttctgttgccactgctaccaagctgcaaacaccaggctcacgaagctttccagggtggtcttgggggtattggctttagaagaggaagcttgatagatgaaaatttccagatcaacggcattttatgtacttctcagaaacaagaaagaaagaatgatgcaggtgctgttcacatgcggccggaaccatgcccttgccaagcaggtcagcggggcacagggactgcgctcctcatgatagtgcagattggctcggaagtactcaattctgtggagtcacagcgccctctgacagatttcagtttctggaaaaggaagggcccccttcagggtacctgctgttcaccttccattagattaaggttgaagagcgagtggccatttgtagagcttactgactatactcaagcaacaaaatgcacacttggaaatcctgtgtcacgtgcctatactagctttgtcgctgattcagcatatacacatcctccagtgtga

SEQ ID NO: 1613 - DNA, 462 bp, Homo sapiens
atgtccagcaatgtggtggattcaggctccaggttcctctcactaacaagtgaaaatgcttggaggtggggggcagacaagcaggcaggggcacgttctgaaattcacggatgtgctggtgtgagagcagtgaagctggggccagcccggaacattggcgcttcctactgtgccgagcctggaggaaaggccatcggctgccgggcagcacaaggacgaagagcacaggctgcagagggcactaaaggccaggaggggcccgtggagcaacacggcagagatgggtcaagagcaaatgcccacgcggctgtcacggggaagatgcagagcagtgggagcctgaggacccagatccttcgctcggaggcaatctctcggggaccactcatgggctccagcctgcaggacgtgatgctgccaccaccattccacaatcgggactcagattccctccacgggtga

SEQ ID NO: 1614 - DNA, 1335 bp, Homo sapiens
atgaggcttggaacgcggagcgcattgtgggcctgtcgtgggtggcgccagcagcacatgcatgcctggctcacagagcagcctttgggtgttcttttcccagaggagctctacggtgactttgaagacttggaaacaggggacatgcacaagggaaaatcgggccccgacactcagagaaacaaggaagaaattgaccccgacgaagaagaaagtgccaagaaaaagcatttggataagaagagaaaattgaaggagatgtttgatgcggaatatgatgaaggagaaagcacatattttgatgatcttaaaggagaaatgcagaaagaagcacaggagaatgggagcagaggaactggaggctgcaactgtggaaaacttttgtggggttttgctgcagagagaagcagagaaatgaagcagtttttggtggaagaagtggaatcaaaaggttttgagctgaatcacgtagaatttgaagatcaagatgatgaagccagagttcagtatgatggttttcgacctgggatgtacatccgcgttgagattgaaaatgttccctgtgaatttgtgcagaactttgacccccattaccccattatcctgggtggcttgggcaacagcgagggaaatgttggacacgtgcagatgcgtctgaagaaacatcgctggtataagaaaatcctcaagtcccaagatccaatcatattttctgtagggtggaggaggtttcagaccatcctgctctattatattgaagaccacaatggaagacaaaggcttctaaagtataccccacagcacatgcattgtggagcagccttttgggatattgtcttcatgcgaacttggtatcctgtttccatcccagccttctataacccagtaacatctttgttgaaaccagtgggtgagaaagacacctggtcaggaatgtggaccacgggccacctcgggctcgcccatggtgtcagactaaagacaaacaaggactctctgtataaggtgtggctgctcagctcagccaagtcactgattccctgtgaagcagggcagtgcttcagctctcgtgcagtgggggatgtgactgctcagactggccaaggcactgactccctggaaagcagggcaccaagtcagctcaggctccaaggggcagggcgcaatggcagctgggaggggaggggcacagcagcgtggccccgcagggagacatcccctctgcttcaggctgatccctctgggggaatgggtggtgggggccagatgtttccttccctcctttatgtgactgtcctgttttccgggctctactggatttctgctactccttga

SEQ ID NO: 1615 - DNA, 1530 bp, Homo sapiens
atgcaggccacagaccacagcggcaaggatgaccaacgaaaggatggcatcctcactctagacagtcaggaggggccctcagactccaggtacaacagccccaggctcaaccctattaggaccctcaaccttgtttccaacccacaagtagttggaaaactccaaaagcaatcggcccggggctgttctggacctgctgaaccctctggggcaccaggctcggttcctagtgcacagaagggcgtcactaactatgtgatgcggaccgaggcaccggggttaaggctgaatctgccagccccacggaaaggcaagcctcgcccacgcgcccacccacctcgagcagggtgtccgcacgcagacccgcctggagggcccgcgctgcacccccacgccaagccccagaaccctggcggcgaggtccaccccagcccccgcatccccccgaacccgggcggcgaggccgctgcggtggtcgcacctgctggctcagtccggcggctccagcccaacctcacccagtccatccttggagccttctgcacatactgggctctgttggtgctcccggaatcgagatgcccccaaaatgccgtcagtgagcaggatcgggtgcccaaggccacctcccgtcctccccggcccgcgccctggtccccggccgccgcctcacctggctcggcgagtcgggggcgggtccgagccccccgggagcgccaggtccgcgcacacctggatcggccgcgggaacccgagcgggccgcgcccagccccgccggagctcaggagccgccgccgcgtagtgtgcagggggctccgtgcattcctgcacagacctctcagaccagtggggtctttctcatggctgccatccggcatctccgaacaatcctgccttctgttttattgtttgttgggtcggaacagcaggtggaggcacaggaagaggagcagggaccccaggcggaggcacagggagaggagcagggaccccaggcggaggcacagggagaggagcagggaccccaggcggaggcacagggagaggagcagggaccccagggggaggcacagggagaggagcagggaccccaggtggaggcaaaggaagaggagcaggaaccgaaagacactgtgcccatttctacagcgttgcagggtgcaggactgctgctgccacccaggctttgtgtctcccatgaagccttcagcaggttctgccctggtcacccctggctgcccatcagcagggctcaggtcccagaggcaccgagggagcttcagatggtgcctcctgccaagacaggccccctgagcgaaccccccagcaggaaggagtcccaagcagccttctctgtagggcacccagagagagtggcatctgtgcaccccacaggtggtcagcatcctacacagacatcgcagaagaatgtaacggagcttacccaaggctctgtgggcaagcttcagaccacgaggacaccatcacgtgcaatgtcccacataccagcatttagagaagccagatga

SEQ ID NO: 1616 - DNA, 267 bp, Homo sapiens
atgcagtccaaccgccacgatcagtcccccaccccattttctgccaaaaataaaggactctcagagctagctgcctcatgtccctgcagaggtaccagcagcaactacgcttacattgtgaaccccagttctaaagatgaacgtttttacatggctgtggcaagaaacagaaggttcactttcacaataaccgaagcagcacagtctaaaattcatcctagagcagtctcagaatctggaacaacaaaaatggtgaaagcagggtag

SEQ ID NO: 1617 - DNA, 597 bp, Homo sapiens
atggacaggaagggggagctggttccgggggaacagaccctaagtccaggtggagacatgtctggactgagaagactcatggccatccctgtcagaagatccaacgggcagccagacagcagagtctggaccacagacgggccgtataaccttgccatgatacgacgaaagctgacggcatgtgtacgcaagcaacagccactcaacaaacatctcctaagctatcacacaccagatgcaggggcgggcacagactccagcacccccagctccgttacgagtcgcccatggaaaggcaacgggattcaacgaggagagaagcagaaacccagcaccctcttctggggaaagacgggaaagcaaggtggaatgtcttccagcaagctggtcaatgggcccaccccacgggggctggtccctcaggccacaggccatgagaagcagcaactacaagggaagagccgctgctggaacacgcccagcggaacagggggaagccaacaatcccggcagatgaaggaaaggaaccggcaggcacaccgctctcacgccaatgcgtgcggacagcctggtgggatcagcaggaccatgacctga

SEQ ID NO: 1618 - DNA, 2754 bp, Homo sapiens
atggtcgtacgcacggagcgcacatccctctccttcctgattggccgagcggggatgtgcgtgatgccacgctccgcccgtcggatcatggcccaggtagcagtgtccaccctgcctgttgaagaagagtcctcctcagagaccaggatggtggtgacattcctcgtgtctgccctcgaatccatgtgtaaagaactggccaagtccaaggcagaagtggcctgcatcgcagtgtacgaaacagacgtgtttgtcgtcggaaccgagagaggatgcgcttttgttaatgccaggacggattttcagaaagattttgcaaaatactgtaaagccttagggacaacagtgatggtgcctgttccctatgagaagatgctgcgagaccagtcggctgtggtagtgcaggggcttccggaaggcgttgcctttcaacaccctgagaattacgaccttgcaaccctgaaatggattttggagaacaaagcagggatttcattcatcataaatagacccttcctaggaccagagagtcagctgggtggccctgggatggtaacagatgcggagagatccatagtatcaccaagtgaaagctgcggccccatcaatgtgaaaactgaacccatggaagattctggaagccacccttcttccacaagcaatgaagtaatagaaatggaattaccaatggaagattccactccgctggtcccttcagaagaaccaaatgaggaccctgaagccgaggtgaaaatcgaaggaaacacaaattcatccagtgttacaaattctgcagcaggtgttgaagatcttaacatcgttcaagtgactgttccagataatgagaaggaaagattatcaagcattgaaaagattaaacagctaagagaacaagttaatgacctctttagccgaaaatttggtgaagcaattggcgtggatttccctgtgaaagttccctacaggaagatcacattcaaccctggctgtgtggtgattgatggcatgcccccgggggtggtattcaaggcccccggctatctggaaatcagttccatgaggaggatcttggaggcagctgagtttatcaaattcacagtcatcaggccgcttccagggcttgagctcagtaatggtgagtattctacagtgggaaaacgcaagatagaccaggagggccgtgtgtttcaagaaaagtgggagagagcgtatttcttcgtggaagtacagaatattccaacatgtctcatatgcaaacaaagcatgtctgtgtccaaagaatataacctaagacgccactatcaaaccaatcacagcaagcattatgaccagtatatggaaagaatgcgtgacgagaagcttcacgagctgaaaaaagggctcaggaagtatctcttaggctcatcagacaccgagtgtcccgagcaaaaacaagtgtttgcaaacccaagtccaacccagaaatcccccgtgcagcctgtagaggacctagctgggaacttatgggagaagttacgtgaaaaaatcaggtcttttgtggcatattctatcgcaatcgatgagatcacggatataaataataccacccagttggccatattcatccgtggtgtcgatgagaatttcgatgtgtccgaagaacttctggacacggtgcccatgacgggtacaaaatctggcaacgagatcttttcgcgtgttgagaaaagcctgaaaaacttctgtatcgactggtcgaaattagtaagcgtggcctccactggcaccccagcgatggtggatgccaataacgggcttgtcacaaaactgaagtccagggtggcgacgttctgcaagggtgcggaactgaagtccatctgttgtataattcatccggaatcactctgtgctcagaagttgaagatggaccacgtcatggacgtggtagtgaagtccgtgaactggatatgctcccggggactgaaccacagtgagttcacaaccttgctctatgagctggacagccagtatggtagcctcctgtactacacggagattaagtggctcagtcgcgggctcgtgctaaagagatttttcgaatccttggaagaaatcgactccttcatgtcatccagagggaaacccctgcctcaactgagctccatagattggatccgagacctggccttcttggttgacatgacgatgcatctgaacgctttgaacatctctctccaaggacactcccaaatcgtcacgcagatgtatgacctgatccgggcgttcctagcaaaactgtgcctctgggagactcatttgacgaggaataatctggcccactttcccaccctgaaattggcttccagaaatgaaagcgatggcctgaactacattcccaaaatcgcggaactcaagaccgaattccagaaaaggctgtctgatttcaaactctacgaaagcgaactgactctgttcagctccccgttctccacgaagatcgacagtgtgcacgaggagctccagatggaggttatcgacctgcaatgcaacacggtcctgaagacgaaatacgacaaggtgggaataccagaattctacaagtacctctggggtagctacccgaaatacaagcaccattgcgcaaagattctttccatgttcgggagcacctacatctgcgaacagctgttctccattatgaaactgagcaaaacaaaatactgctcccagttaaaggattcccagtgggattctgtactccacatcgcaacgtga

SEQ ID NO: 1619 - protein, 566 aa, Homo sapiens
MALLPASLSAVLEGEASVQDSPGSVMKSYVSETMASPGKDNYRMKSYKNNALNPEEMRRRREEEGIQLRKQKREQQLFKRRNVELINEEAAMFDSLLMDSYVSSTTGESVITREMVEMLFSDDSDLQLATTQKFRKLLSKEPSPPIDEVINTPRVVDRFVEFLKRNENCTLQFEAAWALTNIASGTSQQTKIVIEAGAVPIFIELLNSDFEDVQEQAVWALGNIAGDSSVCRDYVLNCSILNPLLTLLTKSTRLTMTRNAVWALSNLCRGKNPPPEFAKVSPCLPVLSRLLFSSDSDLLADACWALSYLSDGPNEKIQAVIDSGVCRRLVELLMHNDYKVASPALRAVGNIVTGDDIQTQVILNCSALPCLLHLLSSPKESIRKEACWTISNITAGNRAQIQAVIDANIFPVLIEILQKAEFRTRKEAAWAITNATSGGTPEQIRYLVSLGCIKPLCDLLTVMDSKIVQVALNGLENILRLGEQEGKRSGSGVNPYCGLIEEAYGLDKIEFLQSHENQEIYQKAFDLIEHYFGVEDDDSSLAPQVDETQQQFIFQQPEAPMEGFQL

SEQ ID NO: 1620 - protein, 330 aa, Homo sapiens
MAGQQFGTEICSKKLRAQNTNPWSSEIREKIYHDPQLLREIKGHKCDRILRCQLPVSLQLDQADCKQLPLWVSGNAVAPRGLEMQDLPRPKEGVTALVGGAPRSVFPEGTQLFSPSLFSSSCLQFGKKGARFSPVYVTPLSALLVGRSRVLVLSPGKMSAQSLEGADVAGGWHVSTALSLHKPGRVVTVPRFGLNLDLNLEWALEAERRQVAGPVHSHYLGQGHDDSLSLSSSSLRWANSHAAGYRLCYSVTFRISEQDLPGSSKLVLCPLFTRPLGITGLSQLSTGPSIMHIAPGLSKQCSAAHIDQVPADQTPHIRSSLMTPSLIRPS

SEQ ID NO: 1621 - protein, 290 aa, Homo sapiens
MTEEEKYITKTTRCQKHSPRNIIFIAVNAVEISEISSHYIDQAQKETAFNRLLSPLASSRVLPTCDNCQRLESEVGVFITQALHLLLHGLAALGICGSKASFSCRAPLPLRIPMTSSLLSSFRPKSGNSSLLLPATGCFNIKMGNIQPPTAIHMWDLMEWDRGQEIYCSKSRINDSKTAGDIETEIKPTYLTLKTGKRARQAESQHLKRGGMWMLKICDQSFAGHSHTATLWKGECEERLGGGKLIFQGTSRTKMDDVQLTVETDVKHKDQAHTDAHTARPPLHPTSGSR

SEQ ID NO: 1622 - protein, 342 aa, Homo sapiens
MAYVMEKRTTGKALPAPSGHLSGPIQHSTLGLMPCPCVSLALVLLSLEHSDVMGFQEANGSLTLLPNGGNKDCLCPLFALDQQLLLTGMTNQMEPKSENQALELAGCIEEYENLKACDKNTNPLGSELKVDTFLVFTGVVKAADCECCLYKIQFTFFIQCIIKNGTTRSPREGEVPGVDYNFLTVKEFLDLEQSGTLLEVGTYEGNYYGTPKPPSQPVSGKVITTDALHSLQSGSKQSTPKRTKSYNDMQNAGIVHAENEEEDDVPEMNSSFTAADSGEQEEHTLQETALPPVNSSIIAAPITDPSQKFPQYLPLSAEDNLGPLPENWEMAYTENGEVYFIE

SEQ ID NO: 1623 - protein, 80 aa, Homo sapiens
MGNIAPTGKLLFSNVSVLWKGEQEFGYGERKLDKDHREEDYDGAGVTERSTDPMLPSFAALCVLYVSCVRTLALAALATK

SEQ ID NO: 1624 - protein, 430 aa, Homo sapiens
MVIPTTIHHYNLMYFLDASSGVETPELHFRVASSFLTASSRKKWIQKEILYRSQVFRGLRERHYSERFLAVQQPFSLVSQQTLGEDKWIQKEILYRSQVFRGLRERHYSERFLAVQQPFSLVSQQTLGEDVHSCASTNVCTDAGNTVLPPTPATTATNAAGVNAYMDTSNSISASVLPLLCCHHWHKHVQEHHLPAPTVALCKPTCVHLATLLWLLYCSTAHKANQQTPFQLLMDCDMKTTSANEALSGSPCRIKQPVETKPPSFCVTSSPLRHQDSPHSTWFQIQPCRLRPMAHLNDMISFMDPGARNYASPCGHRYQAQLSADPEDQFASGSMNTEKNDSPTVGKTAWFEGRGFHGAWTVNLQDCLPKLLFRKPKGKVENGMEKGKELWSDRQEILANVALILLLDGCVISGKTFTNRNFTFHLPNMK

SEQ ID NO: 1625 - protein, 378 aa, Homo sapiens
MEEKKVVQVCPESFKALGVTLPCPPTPNLTAMKLRVTEEMAGPQLQSRAPGISGYTVINSVLLDSKGIACYEEFTLISRPKSPKAAPDPAHVPGGSFSDPAPKHSVQTEPLKPPHRPSVLCEVVMNKLKVEMALETNWQYKVESAGYQCSRDPSREGQEAGDTYVVANRKDSRVQTFAKQESRKVCMSLEFYSTSCKENIRVLQLTHDPLKQVCRFSHLRKILRTFNSTSAKNIFRFPQNINTPKALLSAQMSSAAACIQQTLTEEWVPEEQLSHHTQHCSVSLHLFRWILSFLLGKRSRTRGKKWMGEYKEAMEEHTVGKFSCGQAEGDWLNSKRQMARQRTLAPISPVKSLHCKQQTHAPLFQDPASRPAKAQSYL

SEQ ID NO: 1626 - protein, 1607 aa, Homo sapiens
MEPTAKGRTEESFSYVIRAPSSEGFDIMNVDVKIDTSWIFQDMEDSAEERECLQEEAAGRPDMDMGALRRQLESSEQKLSAAEDKYVTSESGLRSRIQELELSERKLLRKVDQLSTHVAQERSAWLQAQEKLAALQGELASQALFPVQQSRGNSAAAAVGQRQYRIREESVARRQQWRLRRLQERLRRKDEALGQQAVALERCRRTQRRQLGLRGHRGPRLSRGATEAAAELRALQARAERIEREREEAARILHEHRATERQLPGHLEELRCCIYGLKLSDIGLQGPARGWRGQHLGSALELASLLLKLHATMEYVLFVLYFSFFLCLCALVCLYFSGCQEMTYKHEGGSVENDRKVRRQVAERDWIWLGGYLFWGHHHHHHHIIITITIITNITITMTTITIITITTLITITITIATLLLISSWACAHLVGCWSPESIACCVTAQGCQCIFKGLGVTQEDREPHAGLQHLALDNSGDCQRISLHKHPTMAAHGLRIKFNLLSTAFKAPGVLLLQAQSPICHLSHTELQVPECARLFCLDALGCVQGDSLPLPREEALDPCRSQDWRNSLRSNDAPRQRAPAGQSPEGPCTWSRIRPGRASSVLAPGPETTSELPRDLAGSNREQLTLAEPSLDEQILLLVCGCPPEECLDESLLRMDLAWISENLAADPAAEAFLLVQTSALPLWGPAGDSASWRPLLLQEVPSDGQKIQEELATRSPPPPKATGHPGWDCHQTRGRGASLFHEAPYISNHPFLKKHPKDLKDTWNNGGGSLAGRTEEGKARGTLGRKGKNLGDKYQLSQESHQNLSLENGAGAAEDVQDQNGASETKAATCRPGSWQEFLMPLLQGEASVSKEGPESLSRRERVEGYVWGLRGGLSSENEEVAPPATFSRAHETKEPWPTDSQLLAGKVRATGRTARGKEENQVWLGNALLLQGGSLEDKGLEEEDEMPHQEASGLGCRGAPEEPDSQEHESKEMLFFAGETGLPLFPRFALSVEGAEPTDHGHPQAVSKGHNRCALTIDELAQDVEACFQQLSTLQPGSRGWQCSASACRGENWSFAQKWHSGWERAHSQQVWGNWGICSNEEAKSKESGEGDKPGKTTALGTSEVPGNPGTLPHWDEASPNPPQGPAEPWGALERVRSRFHQLISGLKKQRSQILHDNTKLHGDQERFHERVCALEREREREVTKISRLERDNHRLVGDISQLKKELDQYLQAISDLEDCNGKSYCKILELEEENETLKGNLGQLQKATSESVRKSKDTMEQVTLENWKLQTLISELGVSYKELIKDIVLGIEDMIRALSGENEHLLRRVHVLEREVTLQRSTDQGRLVRGREHLQGKAKMHALDKEVQVTPLTGQLLSRACGPPLEEEMSLAAGQTGPSTGTGNSRRGADSPPPSLVWRNTGVANALQGNVSGAEVKEAHLEKEEKRPRCSVAQGQALSSLSNGPMLRDSEAEVTEEDPRLRAQQLHHRVLTLQCQLRDQGAAHQASLDEATRLQEELQAKLEELQKKQHEAKLAVTPLKAKIASLVRKCRERNRLITHLLQELHRHGLGNLLLSELAQNMLNDVALAEYTATFLAPGVPETSHHLDVKSEMTAALRGQCDF

SEQ ID NO: 1627 - protein, 214 aa, Homo sapiens
MEGYRLASASVMEGYWVNLCLGDGGIPLEELQKKQHEAKLAVTPLKAKIASLVRKCRERNRLITHLLQELHRHGLGNLLLSELAQNMLNDVALAEYTATFLAPGVPETSHHLDVKSEMTAALRVRQKPLLIANFRLLLPPGTGGEVVSIMVICLRKALTRLPQPLEEGEEAVAGLSCLLRSLWNQVSPHNVCKKKAECPVLPSKSITSQHPLSS

SEQ ID NO: 1628 - protein, 678 aa, Homo sapiens
MGRRQEEAVLLAFRRDEDNTARKSRDDLVQSPILLTVVGNAFFVFGGGVASSLRGTCRLRAIITWALSLPTCLSTGLRTQVRELLVEIEGISVDASAQAVLCRECQLLSFHSASQLCLLALNRGIAAVKEDAVEMLASYGLAYSLMKFFTGPMSDFKNVGLVFVNSKRDRTKAVLCMVVAGAIAAVFHTLIAYSDLGYYIINKLHHVDESVGSKTRRAFLYLAAFPFMDAMLGADILVGERIFKASKLIVWWLSDNKASPQLCLQMGRELAVAVQNLDMDLGNRPCLPHSSSSSSPKVSGQILPKLEGKKTVGPNQSVSTGNDCNNSDPNESPHYDLHHAWTHAGILLKHKYSFLVGCASISDVIAQVVFVAILLHSHLECREPLLIPILSLYMGALVRCTTLCLGYYKNIHDIIPDRSGPELGGDATIRKMLSFWWPLALILATQRISRPIVNLFVSRDLGGSSAATETGSELGCKESSTEPSTTTQNVSIPEGRSGGLEAVAILTATYPVGHMPYGWLTEIRAVYPAFDKGPDSCPRDTQHDSRLANCHLKPLIQTHQIKQKQDALQDPPNNPSNKLVSTSNTVTAAHIKKFTFVCMALSLTLKDSVQKPDISLTGRLVQTLPTRMRHQRGESKDVAPLASWLSEPSTSSEAVRHTGLRTRALSPWPETPDDRPFT

SEQ ID NO: 1629 - protein, 609 aa, Homo sapiens
MTKLDALASDYLIHSPLWEPKRGVFPLASLLGLGVTDSQCPAAPVVWIIAFPNTGLVPAQAGHDLAADAQCSFGFLPWKILTAFLKIRDPKPDGAGKQSEKSRAAFPKVRAGPGHGCLDAMRMSHSSCSARLYPAGGGLLLQCLEQGSGCPGGCMTVHRQKVPVLKVLKVHPALQKVQLLRRLEGRGRLQGGFWGPVVQEPMGPAAHSRAEEAWSWVQEPESISHRGGDCETRRGAQRKPTVRSLLSLHGKEVSGDMMRHTDKVHHVEMASPGWEGGERSHNEAHREILRVEGRKKRSKAIKFPDLACKISGKTCCYQGFGHGPRQGFQDDKNTTWRQQRKTLSSSMACQGRGSFSYLQNLHMEVLSMPDGGNPFTPSKWGQLVSLGEPQMQAEESGAGMLNSHQGKTPQTKAGLKAAPVLGAGTCLRPLQLPTNNIRKHTKMLYESEQPNRKSCNKQSPKPQLCNTIKLISYSQSHIPVQMNWCGGELWGSCLPRMPPGTHILPWGFIPGALSIEPSTVRTQQHTALQKDPKHIHTSPGCPAMGFIPGAHSIEPSTVRTHQHMAYKTCTIATTDTPNCSEISSPDQQQQRQKGRSYLLIQCFPHSSSR

SEQ ID NO: 1630 - protein, 185 aa, Homo sapiens
MSGRGKGGKGLGKGGAKRHRKVLRDNIQGITKPAIRRLARRGGVKRISGLIYEETRGVLKVFLENVIRDAVTYTEHAKRKTVTAMDVVYALKRQGRTLYGFGSQRLQKLETSRRDCKLPFPKWREGLKTKKARTQTAGLKPRRIRERNTSASVAPDGSEKMDVEDENLSDYFELMFVAMEMLPIC

SEQ ID NO: 1631 - protein, 71 aa, Homo sapiens
MPKTAVLAAERPKKAWGVLIPKKSTKRTPKAFAGGGCWRRLVGQRWPRKFPSRRHPSLRKRPPKQGDIRVP

SEQ ID NO: 1632 - protein, 92 aa, Homo sapiens
MLNFLLKRVAAAAAAAAAAAAAAAAAAAAMFHFFRKPPESKKPSVPETEADGFVLLVVGNNLKTTWVTRGHQASGFPEDPTASPEAAMATLL

SEQ ID NO: 1633 - protein, 962 aa, Homo sapiens
MVVRTERTSLSFLIGRAGVCVMPRSARRIMAQVAVSTLPVEEESSSETRMVVTFLVSALESMCKELAKSKAEVACIAVYETDVFVVGTERGCAFVNARTDFQKDFAKYCKALGTTVMVPVPYEKMLRDQSAVVVQGLPEGVAFQHPENYDLATLKWILENKAGISFIINRPFLGPESQLGGPGMVTDAERSIVSPSESCGPINVKTEPMEDSGSHPSSTSNEVIEMELPMEDSTPLVPSEEPNEDPEAEVKIEGNTNSSSVTNSAAGVEDLNIVQVTVPDNEKERLSSIEKIKQLREQVNDLFSRKFGEAIGVDFPVKVPYRKITFNPGCVVIDGMPPGVVFKAPGYLEISSMRRILEAAEFIKFTVIRPLPGLELSNGEYSTVGKRKIDQEGRVFQEKWERAYFFVEVQNIPTCLICKQSMSVSKEYNLRRHYQTNHSKHYDQYMERMRDEKLHELKKGLRKYLLGLSDTECPEQKQVFANPSPTQKSPVQPVEDLAGNLWEKLREKIRSFVAYSIAIDEITDINNTTQLAIFIRGVDENFDVSEELLDTVPMTGTKSGNEIFSRVEKSLKKFCIDWSKLVSVASTGTPAMVDANNGLVTKLKSRVATFCKGAELKSICCIIHPESLCAQKLKMDHVMDVVVKSVNWICSRGLNHSEFTTLLYELDSQYGSLLYYTEIKWLSRGLVLKRFFESLEEIDSFMSSRGKPLPQLSSIDWIRDLAFLVDMTMHLNALNISLQGHSQIVTQMYDLIRAFLAKLCLWETHLTRNNLAHFPTLKLASRNESDGLNYIPKIAELKTEFQKRLSDFKLYESELTLFSSPFSTKIDSVHEELQMEVIDLQCNTVLKTKYDKVGIPEFYKYLWGSYPKYKHHCAKILSMFGSTYILRTAVLHYETEQNKILLPVKGFPVGFCTPHRNVMERKLLAGPYGTAGSGKLSALLEKESQIGWFITGVGGESRSWWK

SEQ ID NO: 1634 - protein, 933 aa, Homo sapiens
  VARIANT 1: Xaa = Any Amino Acid
XRGYEYVLEPSPVSLPLDRPQETRVLQVSCGRAHSLVLTDREGGIMAQVAVSTLPVEEESSSETRMVVTFLVSALESMCKELAKSKAEVACIAVYETDVFVVGTERGCAFVNARTDFQKDFAKYCKALGTTVMVPVPYEKMLRDQSAVVVQGLPEGVAFQHPENYDLATLKWILENKAGISFIINRPFLGPESQLGGPGMVTDAERSIVSPSESCGPINVKTEPMEDSGSHPSSTSNEVIEMELPMEDSTPLVPSEEPNEDPEAEVKIEGNTNSSSVTNSAAGVEDLNIVQVTVPDNEKERLSSIEKIKQLREQVNDLFSRKFGEAIGVDFPVKVPYRKITFNPGCVVIDGMPPGVVFKAPGYLEISSMRRILEAAEFIKFTVIRPLPGLELSNGEYSTVGKRKIDQEGRVFQEKWERAYFFVEVQNIPTCLICKQSMSVSKEYNLRRHYQTNHSKHYDQYMERMRDEKLHELKKGLRKYLLGLSDTECPEQKQVFAHPSPTQKSPVQPVEDLAGNLWEKLREKIRSFVAYSIAIDEITDINNTTQLAIFIRGVDENFDVSEELLDTVPMTGTKSGNEIFSRVEKSLKKFCIDWSKLVSVASTGTPAMVDANNGLVTKLKSRVATFCKGAELKSICCIIHPESLCAQKLKMDHVMDVVVKSVNWICSRGLNHSEFTTLLYELDSQYGSLLYYTEIKWLSRGLVLKRFFESLEEIDSFMSSRGKPLPQLSSIDWIRDLAFLVDMTMHLNALNISLQGHSQIVTQMYDLIRAFLAKLCLWETHLTRNNLAHFPTLKLASRNESDGLNYIPKIAELKTEFQKRLSDFKLYESELTLFSSPFSTKIDSVHEELQMEVIDLQCNTVLKTKYDKVGIPEFYKYLWGSYPKYKHHCAKILSMFGSTYICEQLFSIMKLSKTKYCSQLKDSQWDSVLHIAT

SEQ ID NO: 1635 - protein, 251 aa, Homo sapiens
  VARIANT 1: Xaa = Any Amino Acid
XVEIELKPNRSGLISHGPVHHQFGSEIRHNLAISSKGLGEPSKRLSNTQRPWGSGRSHHVVFHTMVLKGEVKEVQSYENRSKYMEVECGANVAYAQIMPKQKEQATVSNFKRFALLDSFTSQDNGAITDVSTEGACMPFVNTAPYGTQCGHCNITKFRDLEWSLISLLKTLRHREGKGLAHDTKSSKRIRKIRGREKDKQRWRGQCAGAWAIPHSPPGPEHMPAERDDCLQLRKAATSEAPSLAKLCDKFA

SEQ ID NO: 1636 - protein, 156 aa, Homo sapiens
MLGGPLQVLEAAYSSCRNTSRTHFSGNRHSCEFSEPTAVAASEVVAASLVGQFCGVPALTVQLLKFTRDQPPGGDVGHNTGTGPSLAPGGLGHPGPLLHRAGELTSAVEGGAELHRTKLLPEAAFWAMSSASLAAVRLQEEDTGLRQQFSLQGGCP

SEQ ID NO: 1637 - protein, 704 aa, Homo sapiens
MNTCGVAQSLIDKEEPSPGGDTSLKQSPQLTAIQPGFICGFSIATGAAARLVSGYDSYGNICGQKNTKLEAIPNSGMDHTQRKYVFFLDPCNLDLINRKIKSVALCVAACPRQELKTLSDVQKFAEINGSALCSYNLKPSEYTTSPKSSVLCPKLPVPASAPIPFFHRCAPVNISCYAKFAEALITFVSDNSVLHRLISGVMTSKEIILGLCLLSLGGTGVLWWLYAKQRRSPKETVTPEQLQIAEDNLRALLIYAISATVFTVILFLIMLVMRKRVALTIALFHVAGKVFIHLPLLVFQPFWTFFALVLFWVYWIMTLLFLGTTGSPVQNEQGFVEFKISGPLQYMWWYHVVGLIWISEFILACQQMTVAGAVVTYYFTRDKRNLPFTPILASVNRLIRYHLGTVAKGSFIITLVKIPRMILMYIHSQLKGKNAYTATAINSTNFCTSAKDAFVILVENALRVATINTVGDFMLFLGKVLIVCSTGLAGIMLLNYQQDYTVWVLPLIIVCLFAFLVAHCFLSIYEMVVDVLFLCFAIDTKYNDGSPGREFYMDKVLMEFVENSRKAMKEAGKGGVADSRELKPMVGGDEEVAALQEFHFHFLSLSVFTDCTSSGEAFVICITQDMLLFLFVCLPITWMAEFLSQLRPPSIKQIIELNMRTSGFVLELFPERGSLVKETLKIYEFFYDSLKVILEKCTKSDEEV

SEQ ID NO: 1638 - protein, 710 aa, Homo sapiens
MDTSLLASSRIDSEISIAFINTPDISELLNIFHFCNSNYSTSTYWVQGNWLPSGPDLCSSTSRCYSRNQFLYGLEEPPAGAMRQLYGDTSQCLFDLQVEGSFPDSYVGALRRARFQREAGRPQPLPAPVAAVDGRETRSARAKGGDPTAFALMASFLVLPKNKAKGDQKPGTLAFSRLSPDVSLYSSCLKLGPTNGRQRPKFNPVKPAPANKAHGWRPRDSSGPALRLSPDLYGFRGSLEGQNHIPAAVSFDALRKLQRPKLFPEKRSFTGVPALRPWREELEAPELIGSEIENDTISDPGLNVSLHSIDFTNGCDLVGSSSLHNMLVCKTFVQQNCRCSVESTGDCPDTKDKYAHMTLTDKTLFRKTAHPDLGRRGLNTGPKRGYRPSQEQRQRLQANGAVGRGNDAGQEKPKGSKAGGGTCENGRMGRGDVEEGTGQDNERRSAGSAMRPPGALGAGQGPGCRGSERRQREGVGSEAQQGGEKAALKVLGKDHLPSSPGLLMRGKEMQPKDPEALASSSYTPPRAAGHSTFHRDPCYHSSADEFHSSHFHHHSKGICPPDLAASLSPQLFAMDMTSTTNAVVFKSSPSSRVSTLLISQIQCTIEAPWKDIGLRLPGYIHILQAHPSAHTWGPLMGSNEKPLSPVPLFFQAFPSGLLQAPPVYGAASLQHPPPEQIVRWGMAPQLLQLNTIRVPIQKERPRPTWYTQVV

SEQ ID NO: 1639 - protein, 236 aa, Homo sapiens
MGGGGEGVIIIIGMLVKSSESLKKSQQSTKTGAFGEVHKGWEEPAWKMKEEKQRRGSMLSTAIFVYAATSPVNGYFGGSLYARQGGRRWIKQMFIGAFLIPAMVCGTAFFINFIAIYYHASRAIPFGTMARKFTVWDFLRYFIFTSFWAYKIYYVYGFMMLVLVILCIVTVCVTIVCTYFLLNAEDYRWMYGLFQTSFYFGYMAVFSTALGIMCGAIGYMGTSAFVRKIYTNVKID

SEQ ID NO: 1640 - protein, 212 aa, Homo sapiens
MSGDATRTLGKGSQPPGPVPEGLIRIYSMRFCPYSHRTRLVLKAKDIRHEVVNINLRNKPEWYYTKHPFGHIPVLETSQCQLIYESVIACEYLDDAYPGRKLFPYDPYERARQKMLLELFCKVPHLTKECLVALRCGRECTNLKAALRQEFSNLEEGALQNADVLLRPSGGARGALAEDEVPFQPGFSRAGLGNSASPSYQAVPSSSFASRP

SEQ ID NO: 1641 - protein, 350 aa, Homo sapiens
  VARIANT 1: Xaa = Any Amino Acid
XHDSPDPLDRNLDKIKKNQRLVLTLASYENQKTRKYTKPLLSDTEQEVQARNPREGTQTTRQSERTTSKGLKFGRRLIILIELPASGTSKSKTKLKQSLPPPSTLCVVEKTVGRKSAIAASVCGALFIRYCIYFYHKRRSDPNFKNRLRERRKKQKLPKERAGFSKLPDLKDADAVQKFFLEETQLGEELLAQGKYEKGVDHLTNAIAVCGQPQQLLQVLQQTLPPPVFQMPLTKLPTIREFNVLRACLKMMWNEIQMSNIIKSQGKSNTLVTLTSQAAPHSQPREEHQGRVPFDWLCSVTAAIMKCAADEAVSTPDLLEPALLVETCGYRNIIQSVETLMPITFWGKEM

SEQ ID NO: 1642 - protein, 99 aa, Homo sapiens
MIIPPMFGAVQSVRDGLEKRYIASYLALTVVGMGSWCFHMTLKYEMQVRVTSTWQSGPVQDLRAQAESRGCLSGGAAAAQHQVLEPELSEKGIAWEKER

SEQ ID NO: 1643 - protein, 319 aa, Homo sapiens
MTLAVSRIRAVREDPGEGGYRGPPPPEGSFLQIAPQLWKMSILKVKKAFFALVTNGVRAAPLWDSKKQSFVGMLTITDFINILHRYYKSALVQIYELEEHKIETWREVYLQDSFKPLVCISPNASLFDAVSSLIRNKIHRLPVIDPESGNTLYILTHKRILKFLKLFITEFPKPEFMSKSLEELQIGTYANIAMVRTTTPVYVALGIFVQHRVSALPVVDEKGRVVDIYSKFDVINLAAEKTYNNLDVSVTKALQHRSHYFEGVLKCYLHETLETIINRLVEAEVHRLVVVDENDVVKGIVSLSDILQALVLTGGEKKP

SEQ ID NO: 1644 - protein, 319 aa, Homo sapiens; identical to SEQ ID NO: 1643

SEQ ID NO: 1645 - protein, 58 aa, Homo sapiens
MEARWQLAAGDHGQRGCGGEGRGDDHKLQSPQGVGSPLHSVHPQGQVQQKSMTVSQLN

SEQ ID NO: 1646 - protein, 280 aa, Homo sapiens
MSTHAGGRNKKARTMPKAGGNEEGTTAGGHHQLVRVTRHPVYPSHASIPGDTIRAFSSTWTLSTQFAWVTEEVPAVVAPLSPTGRNNENKNKMWKYRKWERHLRVKCSPTGSFPGGVPHSKDGGELQFARVLQAPSRTLLKARCGQEECLFGCFNINHFRDWPKCCKGFTRHRSLISVALPCGKINKYPVVKFKTRRMCQLVPVAAVTQKLDPVTEKHEGKLCRGNKYSSPKSYIAQAFHAYYGKIRLLHDIKVLADHDLNCVLTSIQNLVALNNTGGGS

SEQ ID NO: 1647 - protein, 697 aa, Homo sapiens
  VARIANT 1: Xaa = Any Amino Acid
XHLLDFFHLDIPLALELNISRTEPIIPSAQLTSPAGDFSSLVVPVGSCAPEPQPGQFLHTAGSLANSAELDSAIVELFLLLEWVYPDYFTAFQGFVVHESKHPSERCYCKSLCKNLLNVLVVGELWVLTTLDVSRYNKNVKSSATFEDFQIRPHALFVHSYRAPAFCDHCGEMLWGLVRQGLKCEGCGLNYHKRCAFKIPNNCSGVRRRRLSNVSLTGVSTIRTSSAELSTSAPDEPLLRRPGKLGANGRASALKGIGPPMSRCPSRQCNGTSKGDSWMASGALHRHLNRETGHESGSLSQLGKENRRWREWLTTPTRKLEVARVARYPNQERELEAGKCMSVCDKDCSRRKQQSFIGREKRSNSQSYIGRPIHLDKILMSKVKVPHTFVIHSYTRPTVCQYCKKLLKGLFRQGLQCKDLLSPGAESDVVMEEGSDDNDSERNSGLMDDMEEAMVQDAEMAMAECQNDSGEMQDPDPDHEDANRTISPSTSNNIPLMRVVQSVKHTKRKSSTVMKEGWMVHYTSKDTLEIPLSEILSLEPVKTSALIPNGANPHCFEITTANVVYYVGENVVNPSSPSPNNSVLTSGVGADVARMWEIAIQHALMPVIPKGSSVGTGTNLHKKKKKGEGHEEEEEEKEQEEKEEGEEEEAEEEGEGEEEEEEEEEEKEEGEGEGRRKKKKSSQLQLDMECKSCYLQI

SEQ ID NO: 1648 - protein, 131 aa, Homo sapiens
NLPLLPYELGKGDQGPGVLSGAMLKVEPPFLCDFLGEKIASVLGISTPKYQYAIDEYYRMKKEEEEEEEENRMSEEAEKQYQQNKLQTDSIVQTDQPETVISSSFVNVNFEMEGDSEVIMESKQNPVSVPP

SEQ ID NO: 1649 - protein, 55 aa, Homo sapiens
MKPNHVFNGKDVPIENLTGTPSFSYWNESEHRVEINHRDYLDPSICDVISDAASP

SEQ ID NO: 1650 - protein, 274 aa, Homo sapiens
  VARIANT 1: Xaa = Any Amino Acid
XCTFRFPSTNIKITFTALSSEKREKQEASESPVKAVQPHISPLTINIPDTMAHLISPLPSPTGTIRQQLGILVQMAGSGSLEVSRVVAVESAQPSCADASRRNRSSEEPRVRRVSNAELADRARPRPPRAQGPPGPVTTGPSTLERPQLGLGTVRALTDSLVNAAWPPPPPQDPREAETGARTRSPRRLRVNSGRGGNDQKRFERVLGVFEPAPLRVTEQPVQGRKRVTAADRRLPRLSPCHGNNRAAHAGGFCSCYCRNGLLWMLLCGWHFCA

SEQ ID NO: 1651 - protein, 1584 aa, Homo sapiens
  VARIANT 1: Xaa = Any Amino Acid
XARKKDSETYMLLASVKFHVPRGPTILYVKLHCYISSPRNLAYGLGMAYELYGSRRSDPGLEEGQLSRGEDESRMPLGQCFIKSCAQIPAVEQRLAMEGKGLSDNRTSEMDPKHFSPCPGWAESSRENQTVPGVWGLDQENAAHGNMEGFIDGHFPPRIQGPFITVVPSPQEVSGLLRCSAAEIIVKTFEENRSERAGMVTDYGIAPGEGEEEEKGFHPTFVLGAHLLQAYLQGFAALIHEDRKTPLTCSVFEQLSLIMKFRHSDWCTIDICFVCCGIGDSRCYVKAARLGHEAESQRSPCETRALSKHWPDCSKATHQATPLVLLPHPPLAAMMLLQHASLFTETFTEGRTTTLDGTFDRSVTLLEVCGSWPEGFGLRHMSSMEHTEEGLRERLADAMAESPSRDVVGSGTGPAFFSTQMPCVPVCGSGSLGGGGERGASLPQSQGPKRSVYFSIVVHIFSKKIPQCFSFQKGKKKEKKNNANSPASVSNPTVTKHAFGMEEELQREGSIETLSNSSGSTSGSIPRNFDGYRSPLPTNESQPLSLFPTGFPGPLGIHVTYRFSRHYLVNGQLYYGLPLNLMKEKYLHDLERGRDGEGGGGTAGARIVARRHRAAPGNPDPLPAKAFPNANPEPVNAPASPPLPHRRPSQTSITTISPPCTSNARRCTDVHLTSADQVSQAYSGHPRNRGPGPKTTFRNQPECSRPSPIGSRRRALPRDEKKLKKWLAGRREEAGISEEGDFRLRYRIGRKFVGSRVENPGSARAVPPCAQRKSRVPLAVRRTGSPEEQLLRPPPGSSVHRARRRPGRGSEPRAPGPGPGPRAPGPDVPMREPALAASAMAYHPFHAPRPADFPMSAFLAAAQPSFFPALALPPGALAKPLPDPGLAGAAAAAAAAAAAAEAGLHVSALGPHPPAAHLRSLKSLEPEDEVEDDPKVTLEAKELWDQFHKLGTEMVITKSGRRMFPPFKVRVSGLDKKAKYILLMDIVAADDCRYKFHNSRWMVAGKADPEMPKRMYIHPDSPATGEQWMAKPVAFHKLKLTNNISDKHGFTILNSMHKYQPRFHIVRANDILKLPYSTFRTYVFPETDFIAVTAYQNDKAGGYQVDAPRVFPLRPAPADLGVPPTTLEEPRPDLAPPPWSPQITQLKIDNNPFAKGFRDTGNGRREKRKQLTLPSLRLYEEHCKPERDGAESDASSCDPPPAREPPTSPGAAPSPLRLHRARAEEKSCAADSDPEPERLSEERAGAPLGRSPAPDSASPTRLTEPERARERRSPERGKEPAESGGDGPFGLRSLEKERAEARRKDEGRKEAAEGKEQGLAPLVVQTDSASPLGAGHLPGLAFSSHLHGQQFFGPLGAGQPLFLHPGQFTMGPGAFSAMGMGHLLASVAGGGNGGGGGPGTAAGLDAGGLGPAASAASTAAPFPFHLSQHMLASQGIPMPTFGGLFPYPYTYMAAAAAAASALPATSAAAAAAAAAGSLSRSPFLGSARPRLRFSPYQIPVTIPPSTSLLTTGLASEGSKAAGGNSREPSPLPELALRKVGAPSRGALSPSGSAKEAANELQSIQRLVSGLESQRALSPGRESPK

SEQ ID NO: 1652 - protein, 85 aa, Homo sapiens
MPKLAHRCQENRKHMELSWTHLQLGANICRAQPKSTKSLQFDQIQFYSMMMVSWSKRTVTATGIDSEFQMEEKEEDKTVGDYASS

SEQ ID NO: 1653 - protein, 228 aa, Homo sapiens
MEAEPIPDSSMPAKLLAPPCLNLERLGGSPSQEKPRTPGCCRISERDSKDTQTRISQKGRRLQPPGTPSAPPQRRPRKQLTLPGHRESGPWVRGGDSEVSDKAGLQPADHPHVQLQRKHQCGSLPCSSRSQESPADAVGGPAAHPGGTEAHSAGSEALEPRRCASCRTQRTPLWRDAEDGTPLCNACGIRYKKYGTRCSSCWLVPRKNVQPKRLCGRCGVSLDPIQEG

SEQ ID NO: 1654 - protein, 94 aa, Homo sapiens [sequence omitted]

SEQ ID NO: 1655 - protein, 270 aa, Homo sapiens
MAGAENWPGQQLELDEDEASCCRWGAQHAGARELAALYSPGKRLQEWCSVILCFSLIAHNLVHLLLLARWEDTPLVILGVVAGALIADFLSGLVHWGADTWGSVELPIVGKAFIRPFREHHIDPTAITRHDFIETNGDNCLVTLLPLLNMAYKFRTHSPEALEQLYPWECFVFCLIIFGTFTNQIHKWSHTYFGLPRWVTLLQDWHVILPRKHHRIHHVSPHETYFCITTGWLNYPLEKIGFWRRLEDLIQGLTGEKPRADDMKWAQKIK

SEQ ID NO: 1656 - protein, 1196 aa, Homo sapiens
MRSGRHPSLLLLLVLLLWLLQVSIIDSVQQETDDLTKQTKCHYKFQEKIYQPLRRSKRRWVITTLELEEEDPGPFPKLIGELFNNMSYNMSLMYLISGPGVDEYPEIGLFSLEDHENGRIYVHRPVDREMTPSFTVYFDVVERSTGKIVDTSLIFNIRISDVNDHAPQFPEKEFNITVQENQSAGQPIFQMLAVDLDEENTPNSQVLYFLISQTPLLKESGFRVDRLSGEIRLSGCLDYETAPQFTLLIRARDCGEPSLSSTTTVHVDVQEGNNHRPAFTQENYKVQIPEGRASQGVLRLLVQDRDSPFTSAWRAKFNILHGNEEGHFDISTDPETNEGILNVIKPLDYETRPAQSLIIVVENEERLVFCERGKLQPPRKAAASATVSVQVTDANDPPAFHPQSFIVNKEEGARPGTLLGTFNAMDPDSQIRYELVHDPANWVSVDKNSGVVITVEPIDRESPHVNNSFYVIIIHAVDDGFPPQTATGTLMLFLSDINDNVPTLRPRSRYMEVCESAVHEPLHIEAEDPDLEPFSDPFTFELDNTWGNAEDTWKLGRNWGNSPHQGVGGCWESLRHILASGKKGVSREAPGLTSLFGLGQSVELLTLRSLPRGNYLVPLFIGDKQGLSQKQTVHVRICPCASGLTCVELADAEVGLHVGALFPVCAAFVALAVALLFLLRCYFVLEPKRHGCSVSNDEGHQTLVMYNAESKGTSAQTWSDVEGQRPALLICTAAAGPTQGVKDLEEVPPSAASQSAQARCALGSWAYPDATMHRQLLAPVEGRMAETLNQESWGSSATLSGEALCRPDHVSTENVACGDHHVVSSLPIFTFAHTHVNACTCTHTAHAKWTVWTVSQKLHVANVLEDDPGYLPHVYSEEGECGGAPSLSSLASLEQELQPDLLDSLGSKATPFEEIYSESAPIVNNVASIVNNIAPIVNNVAPIVNNVASIVNNVAPIVNNVAPIVNNIAPIVNNSKERNRFSLSRGCIIPQGRATAGRGLPQDIYKEMMPRRLTQTGKRKHGALARTPSFKKVVYDHKEVSLICWVQTSPEDPPPHIPWIRTHQWFPSAWEFPFNGLRTMSLPFLPEAQNPSYRSLPQRPSWASLQAFAYSVPSSWSPVPTPIYRNSTSPPGCPDGPRTGRLVYLPRSRVGSGPLAIMAEILLYLPLAAGALLTSSRVVNKELRMLSCPGTWLQVA

SEQ ID NO: 1657 - protein, 468 aa, Homo sapiens
MGLLVSKYFRLQRKGMRIKSMVIRDDFYQQGNSPKLHKQQSDCKAYVVGGRPTALGALHLWVGDRAQVSSTGNAPRLRVSGSQPLNPQRGLTPPGGGEQSECWVRNRPVLRNSECAFGFRGRRAEKDLRATVLTAAMEALAMGSRALRLWLVAPGGGIKWRFIATSSASQLSPTELTEMRNDLFNKEKARQLSLTPRTEKIEVKHVGKTDPGTVFVMNKNISTPYSCAMLISGAFCYDVVLDSKLDEWMPTKENLRSFTKDAHALIYKDLPFETLEVEAKVALEIFQHSKYKVDFIEEKASQNPERIVKLHRIGDFIDVSEGPLIPRTSICFQYEVSAVHNLQPTQPSLIRRFQGVSLPVHLRIEFLTIRAISIGWESQGDRLILWNKQKQDDSQLESDCRDSLPQHPDLTLAQRKGAREEQVGGFSSWTESAGDQQVPKRGRNGLQAILDFIPTSSPFKSPRLVWNT

SEQ ID NO: 1658 - protein, 144 aa, Homo sapiens
MPAKQKGKFEDMAKVDNAHYEREMKTYIPPKGEIKKEYRPKIKGEHPGLSIGDVAKKLEEMWNDIAADGKQPSEKKAAKLKEKYEKDIAAYQAKGKPDAAKKGVVKAEKSKKKKEEEEDEEDEEDEEEEEDEEDEDEEQGDDDE

SEQ ID NO: 1659 - protein, 378 aa, Homo sapiens
MLPLVTSVRGATPHCDQSRPVAVLKAEAFIAFLVGALRDAQAALLSLAHLALNCLKLGPTNGRQRPKFNPVKPAPANKAHGWRPRDSSGPALRLSPDLYGFRGSLEGVWSTGGLPTFFLHYLTASGGCWDTGGLGASGPPAGQLLSGAPTQAHGSMKQEEEAERERSRPPQPRLGQDKRWETRAAPHPSPRCRARPPSQNHIPAAVSYDALRKLQRPKLFPEKRSFTGVPALRPWREELEAPELIGSEIENDTISDPGLNVSLHSIDFTNGCDLVGSSSLHNMLVCSSYDINRQDTFQKDRLRMPSQHLPSRICTGRAITPHQPGPHNRMPEASSAPQRRLSSLPPTPPHPISQMVTLTTRERVVACQGLLIQSHLLV

SEQ ID NO: 1660 - protein, 266 aa, Homo sapiens
MEIRGKWSFAEHTSFSLRNAAYLIGDSVVLLCSEGKQRRWQVAGNLGEKGGLGGSLSDQELDLERLAGGRIKIIQECRFAEYQLELTDDYIIRINRLKMKGRIKVMFGCEFNFVADESFNVCQNKIHIAKGEREEGKKKGGWEKERKEGSPLKSHKESVWNLHNENLVEFLEVRSIRVTAPLKRVDSRSSLLSCYSSQPLVIAQTSHGHVSLPIKDYVSSAPGIYEEELPMSSIGSTEDSTKLPVLRFATEGAEGHWDVGFIYVKS

SEQ ID NO: 1661 - protein, 527 aa, Homo sapiens
MQKRIHAGKAQSSLVSSLPQWKLTNDFMVLHADETTDLAGLKNLTDASWSEGLPKELDSQLMQFPHPDYFIPLTLTNEKPQFFSPLPSIIPLKPQSRTPQGDRFEEANHQPPIEEEEMRGLRRKVHQTPLTNIIPVRKEADEGCGESASIFCPRQFCWKPQRVNPQEPLGWEFTSICRLEKRSAPIDINGKAGLWTVLPGYQQQRVVSGESGDGDQALGDLNQVSPGAQLSDKAEQKAQTAGAAGPRRAPPPRPGRGLSSGSRGNARLRQQPPGGARAEVSEPVSCRVAGCMGFVRVPSSLLSELTESRPDISNIFTLFPHPHHREWSQGFRRDRTLLSAPFPAAVAKLTSEDERGRRWALRPYFPFYVPNLTAPQGALADCLSAPEPARLQGKSQAAEMIQGAQIYEGLDVGGWEVEGGKKRIHAGKAQSSLVSSLPQWKLTNDFMATLALTSVTRKVRVLVPCPSQKQDLGEREMRSGGKALRGCSIPGCRYIPRAFQPAAIEGGAFFTELQTCLPRLFTGSCHS

SEQ ID NO: 1662 - protein, 271 aa, Homo sapiens
MVVGELGKLFHNACNKEDSMALKEQKEKGRDNMQRALYCTTVKYGREPLKTTSESAENLVDGPIDLTPSLCTGHCAEGWPAEFLGIVPSGTHFYHFAQATATATSMGAATIAHSGELLTGQLPLRILRIRITTSEEAGTPWQPISYPIPTHSPLTPAPNLPACIPDFSFSLPLTGPDIAFSHGGFPHGALTPQPFQIPHVGHQVGLMDSHTSNARGKPRVGGEWHPVRAGGRIHYSGISKGSYIWDDHFVSEFWLVGSIEEAPLPQAGTES

SEQ ID NO: 1663 - protein, 439 aa, Homo sapiens
MPGWRGARRVRVAWRPWGWGGVGGTVLAQGVKQMFVELLFPRMEKAFSHSNQDGFFIDTRTLHNILPNTNYYYHDTPALRHVSRFRLVPCSRARKTFPCRHIPLTFYRPNRQRTKTQPPYLPVIDNHLISLDPWTRTCNLPDCRHEKSGNMCRHEESGNMYPFQVGSVIAGISFSFRVPLHSPHLDAGAQRGCWLQHTQLSCVLSVEPWQGRNPSEQELSAACQVEWAKPSLFMGGIRTHIPGQHLQGRWDPGCLSSLSDPRNPRFRQVLTSLLLLQEMPCEYVPIKVQVPFSLQDDNMLLLNQTLTTAEKEVALQAAEKFGDEFFISYSAKEGDEPYPIGRTAVPLEDPTWDPDDEMGEWKRKHFQKNNFNCTRRAQCPETNISSIQIQGDADYFINHLGVPIVQFAYEDIKTLEANPIDYHWFEDFQQFRDDFEQSK

SEQ ID NO: 1664 - protein, 103 aa, Homo sapiens
VTEPQRLRLWQNHRGFPKEREQSDEALTELWLELQAKAAPDPGCRTLLSAARLIRQLSIQRSNWIELRKAVSVSCPDPWHFEQRIEQNAESNRGTKHRKKQQK

SEQ ID NO: 1665 - protein, 229 aa, Homo sapiens
MGSEKLQLRHMVEEDLRTEKGKGCTGNRSEAQKEPGWLLLDDCLVCSWFEELPAFGRNWVIDTRVGSRSFVAMGMLTKIAWDAHKAAAKPEGCCQAGLSTGHGATGSSPDFPTQEGSRGDSGGAVLGGPFSVQVRTQALGDPGSTVTVLCNRVILFMTTLGTAKEHNKKYTELIVELLFLPAIQRGKDKATQPWGLLLKNTSQFNHQGRYDNKCQYGGVNIRGYSRTLL

SEQ ID NO: 1666 - protein, 166 aa, Homo sapiens
MRRERVSGQLQGQDQLPEIQPGARLQGCVDPGTKGHGGDRAVRGHGIEREVAILFSGRGPTVSIIVLLRPKLETPLSDKHWPHQRHGRPGGDSNLPVNQLFSLNIPVILLERNVSLGTTYNSEEHTGSPILYGPVCVQHGRQKGLESHVVVTGACCWHKINYTDLC

SEQ ID NO: 1667 - protein, 58 aa, Homo sapiens
MRPETITIQHCVAPPFHCQSKGTLEIGGNTSQAFQVLTWLAAQARPKTAAHQAASRRM

SEQ ID NO: 1668 - protein, 193 aa, Homo sapiens
MAVEEEDPGFLICSLSPLILTASEQPLSKLCPPAPQTDALWPFLRPRTGDRSSHAAGDLSAHAAGDLSSHAAGDLSSHAAGDFSRHAAGELSPYAAGDLSSHAAGDLSSYAADVKGYITYPTAYDASWKAFPPKQSDKMIVKKMSDRSTLHAGKPVESICISDITGNHLCSFSHSVDRLLLLNLRHIELCNIH

SEQ ID NO: 1669 - protein, 289 aa, Homo sapiens
MGSEIAATSLQNTFFIAQEGQAWRPHMVSSTLKSTKQPMRNSSFQSCAHHAVWSTCRSTQQALPGPETPVTHAPPAPPVAGLSVVVASATLQTLPAPCTPTQILFPCDRCCCCLFRPWFIVGELIVLLPLLPSCKHQAHEAFQGGLGGIGFRRGSLIDENFQINGILCTSQKQERKNDAGAVHMRPEPCPCQAGQRGTGTALLMIVQIGSEVLNSVESQRPLTDFSFWKRKGPLQGTCCSPSIRLRLKSEWPFVELTDYTQATKCTLGNPVSRAYTSFVADSAYTHPPV

SEQ ID NO: 1670 - protein, 153 aa, Homo sapiens
MSSNVVDSGSRFLSLTSENAWRWGADKQAGARSEIHGCAGVRAVKLGPARNIGASYCAEPGGKAIGCRAAQGRRAQAAEGTKGQEGPVEQHGRDGSRANAHAAVTGKMQSSGSLRTQILRSEAISRGPLMGSSLQDVMLPPPFHNRDSDSLHG

SEQ ID NO: 1671 - protein, 444 aa, Homo sapiens
MRLGTRSALWACRGWRQQHMHAWLTEQPLGVLFPEELYGDFEDLETGDMHKGKSGPDTQRNKEEIDPDEEESAKKKHLDKKRKLKEMFDAEYDEGESTYFDDLKGEMQKEAQENGSRGTGGCNCGKLLWGFAAERSREMKQFLVEEVESKGFELNHVEFEDQDDEARVQYDGFRPGMYIRVEIENVPCEFVQNFDPHYPIILGGLGNSEGNVGHVQMRLKKHRWYKKILKSQDPIIFSVGWRRFQTILLYYIEDHNGRQRLLKYTPQHMHCGAAFWDIVFMRTWYPVSIPAFYNPVTSLLKPVGEKDTWSGMWTTGHLGLAHGVRLKTNKDSLYKVWLLSSAKSLIPCEAGQCFSSRAVGDVTAQTGQGTDSLESRAPSQLRLQGAGRNGSWEGRGTAAWPRRETSPLLQADPSGGMGGGGQMFPSLLYVTVLFSGLYWISATP

SEQ ID NO: 1672 - protein, 509 aa, Homo sapiens
MQATDHSGKDDQRKDGILTLDSQEGPSDSRYNSPRLNPIRTLNLVSNPQVVGKLQKQSARGCSGPAEPSGAPGSVPSAQKGVTNYVMRTEAPGLRLNLPAPRKGKPRPRAHPPRAGCPHADPPGGPALHPHAKPQNPGGEVHPSPRIPPNPGGEAAAVVAPAGSVRRLQPNLTQSILGAFCTYWALLVLPESRCPQNAVSEQDRVPKATSRPPRPAPWSPAAASPGSASRGRVRAPRERQVRAHLDRPREPERAAPSPAGAQEPPPRSVQGAPCIPAQTSQTSGVFLMAAIRHLRTILPSVLLFVGSEQQVEAQEEEQGPQAEAQGEEQGPQAEAQGEEQGPQAEAQGEEQGPQGEAQGEEQGPQVEAKEEEQEPKDTVPISTALQGAGLLLPPRLCVSHEAFSRFCPGHPWLPISRAQVPEAPRELQMVPPAKTGPLSEPPSRKESQAAFSVGHPERVASVHPTGGQHPTQTSQKNVTELTQGSVGKLQTTRTPSRAMSHIPAFREAR

SEQ ID NO: 1673 - protein, 88 aa, Homo sapiens
MQSNRHDQSPTPFSAKNKGLSELAASCPCRGTSSNYAYIVNPSSKDERFYMAVARNRRFTFTITEAAQSKIHPRAVSESGTTKMVKAG

SEQ ID NO: 1674 - protein, 198 aa, Homo sapiens
MDRKGELVPGEQTLSPGGDMSGLRRLMAIPVRRSNGQPDSRVWTTDGPYNLAMIRRKLTACVRKQQPLNKHLLSYHTPDAGAGTDSSTPSSVTSRPWKGNGIQRGEKQKPSTLFWGKTGKQGGMSSSKLVNGPTPRGLVPQATGHEKQQLQGKSRCWNTPSGTGGSQQSRQMKERNRQAHRSHANACGQPGGISRTMT

SEQ ID NO: 1675 - protein, 917 aa, Homo sapiens
MVVRTERTSLSFLIGRAGMCVMPRSARRIMAQVAVSTLPVEEESSSETRMVVTFLVSALESMCKELAKSKAEVACIAVYETDVFVVGTERGCAFVNARTDFQKDFAKYCKALGTTVMVPVPYEKMLRDQSAVVVQGLPEGVAFQHPENYDLATLKWILENKAGISFIINRPFLGPESQLGGPGMVTDAERSIVSPSESCGPINVKTEPMEDSGSHPSSTSNEVIEMELPMEDSTPLVPSEEPNEDPEAEVKIEGNTNSSSVTNSAAGVEDLNIVQVTVPDNEKERLSSIEKIKQLREQVNDLFSRKFGEAIGVDFPVKVPYRKITFNPGCVVIDGMPPGVVFKAPGYLEISSMRRILEAAEFIKFTVIRPLPGLELSNGEYSTVGKRKIDQEGRVFQEKWERAYFFVEVQNIPTCLICKQSMSVSKEYNLRRHYQTNHSKHYDQYMERMRDEKLHELKKGLRKYLLGSSDTECPEQKQVFANPSPTQKSPVQPVEDLAGNLWEKLREKIRSFVAYSIAIDEITDINNTTQLAIFIRGVDENFDVSEELLDTVPMTGTKSGNEIFSRVEKSLKNFCIDWSKLVSVASTGTPAMVDANNGLVTKLKSRVATFCKGAELKSICCIIHPESLCAQKLKMDHVMDVVVKSVNWICSRGLNHSEFTTLLYELDSQYGSLLYYTEIKWLSRGLVLKRFFESLEEIDSFMSSRGKPLPQLSSIDWIRDLAFLVDMTMHLNALNISLQGHSQIVTQMYDLIRAFLAKLCLWETHLTRNNLAHFPTLKLASRNESDGLNYIPKIAELKTEFQKRLSDFKLYESELTLFSSPFSTKIDSVHEELQMEVIDLQCNTVLKTKYDKVGIPEFYKYLWGSYPKYKHHCAKILSMFGSTYICEQLFSIMKLSKTKYCSQLKDSQWDSVLHIAT

SEQ ID NO: 1676 - DNA, 24 bp, Homo sapiens
ttggttcccaagacaagccgtgac

SEQ ID NO: 1677 - DNA, 25 bp, Homo sapiens
tctcaacgctaccaggcactccttg

SEQ ID NO: 1678 - DNA, 25 bp, Homo sapiens
gcacagcccaaagtcaaaggcatta

SEQ ID NO: 1679 - DNA, 25 bp, Homo sapiens
caggcactccttggtcaaatgtggg

SEQ ID NO: 1680 - DNA, 25 bp, Homo sapiens
ggacagggaaaggagaggctagtca

SEQ ID NO: 1681 - DNA, 25 bp, Homo sapiens
tgcattctctcccacatctcaacgc
